(19) United States
(12) Patent Application Publication
(10) Pub. No.: US 2017/0269090 A1
(43) Pub. Date: Sep. 21, 2017

(54) COMPOSITIONS, METHODS AND KITS FOR DIAGNOSIS OF LUNG CANCER

(71) Applicant: Integrated Diagnostics, Inc., Seattle, WA (US)

(72) Inventors: Paul Edward KEARNEY, Seattle, WA (US); Xiao-Jun Li, Bellevue, WA (US); Clive Hayward, Seattle, WA (US)

(21) Appl. No.: 15/456,830

(22) Filed: Mar. 13, 2017

Related U.S. Application Data
(60) Provisional application No. 62/310,258, filed on Mar. 18, 2016.

(51) Int. Cl. G01N 33/574; G06F 19/00

(52) U.S. Cl. CPC G01N 33/57423; G06F 19/3431; G06F 19/321; G06F 19/345; G01N 2458/15; G01N 2560/00; G01N 2333/988; G01N 2333/47; G01N 2333/4724; G01N 2333/745; G01N 2333/78

(57) ABSTRACT

Presented herein are compositions, methods, and kits for determining whether a pulmonary nodule is cancer and/or is not cancer.

### RELATED APPLICATIONS

[0001] This application is a claims priority to and the benefit of U.S. Ser. No. 62/310,258, filed Mar. 18, 2016, the contents of which are incorporated herein by reference in their entireties.

### INCORPORATION BY REFERENCE OF SEQUENCE LISTING

[0002] The contents of the text file named “IDIA-014_001US Sequence Listing.txt”, which was created on Mar. 1, 2017 and is 893 KB in size, are hereby incorporated by reference in their entireties.

### BACKGROUND

[0003] Lung conditions and particularly lung cancer present significant diagnostic challenges. In many asymptomatic patients, radiological screens such as computed tomography (CT) scanning are a first step in the diagnostic paradigm. Pulmonary nodules (PNs) or indeterminate nodules are located in the lung and are often discovered during screening of both high risk patients or incidentally. The number of PNs identified is expected to rise due to increased numbers of patients with access to health care, the rapid adoption of screening techniques and an aging population. It is estimated that over 3 million PNs are identified annually in the US. Although the majority of PNs are benign, some are malignant leading to additional interventions. For patients considered low risk for malignant nodules, current medical practice dictates scans every three to six months for at least two years to monitor for lung cancer. The time period between identification of a PN and diagnosis is a time of medical surveillance or “watchful waiting” and may induce stress on the patient and lead to significant risk and expense due to repeated imaging studies. If a biopsy is performed on a patient who is found to have a benign nodule, the costs and potential for harm to the patient increase unnecessarily. Major surgery is indicated in order to excise a specimen for tissue biopsy and diagnosis. All of these procedures are associated with risk to the patient including: illness, injury and death as well as high economic costs.

[0004] Frequently, PNs cannot be biopsied to determine if they are benign or malignant due to their size and/or location in the lung. Accordingly, there exists a need for non-invasive diagnostic assays to determine whether a PN is malignant or benign.

### SUMMARY

[0005] Diagnostic methods that can replace or complement current diagnostic methods for patients presenting with PNs are needed to improve diagnostics, reduce costs and minimize invasive procedures and complications to patients. The present invention provides novel compositions, methods and kits for identifying protein markers to identify, diagnose, classify and monitor lung conditions, and particularly lung cancer. The present invention uses a blood-based multiplexed assay to distinguish benign pulmonary nodules from malignant pulmonary nodules to classify patients with or without lung cancer. The present invention may be used in patients who present with symptoms of lung cancer, but do not have pulmonary nodules.

[0006] The disclosure provides a method of identifying a status of a pulmonary nodule comprising, (a) performing an analysis to predict that the pulmonary nodule is not malignant, comprising, (1) assessing the expression of a plurality of proteins comprising determining the protein level of at least each of ALDOA, FRIL, LG3BP, TSP1, and COIA1, and, (2) calculating a first score based on the protein measurements of step (1); (b) classifying the risk that the pulmonary nodule of (a) is benign as (1) statistically significant if the score in step (a)(2) is greater than a first threshold score; or (2) not statistically significant if the score in step (a)(2) is lesser than the first threshold score; (c) performing an analysis on the pulmonary nodule of (b)(2), comprising, (1) assessing the expression of a plurality of proteins comprising determining the protein level of at least each of ALDOA, TSP1, FRIL, KIT, and GGH, and (2) calculating a second score based on the protein measurements of step (1); (d) classifying the risk that the pulmonary nodule of (c) is malignant as (1) statistically significant if the score in step (c)(2) is greater than a second (2) not statistically significant if the score in step (c)(2) is less than the second threshold score; thereby identifying the status of the pulmonary nodule as benign or malignant.

[0007] In one embodiment, the pulmonary nodule has a diameter of less than or equal to 3 cm. In another embodiment, the pulmonary nodule has a diameter of about 0.8 cm to 2.0 cm, inclusive of endpoints.

[0008] In one aspect, the analysis of (a) or (b) above is performed on a biological sample selected from the group consisting of tissue, lymph tissue, lymph fluid, blood, plasma, serum, whole blood, urine, saliva, and excreta.

[0009] In one embodiment, the biological sample is obtained from a subject. In one aspect, the subject is at risk of a lung condition. In one aspect, the lung condition is cancer. In one aspect the lung condition is non-small cell lung cancer (NSCLC). In one embodiment, lung condition is chronic obstructive pulmonary disease, hamartoma, fibroma, neurofibroma, granuloma, sarcoidosis, bacterial infection or fungal infection.

[0010] In another embodiment, the assessing steps of (a)(1) and/or (c)(1) are performed by liquid chromatography-selected reaction monitoring mass spectrometry (LC-SRM-MS). In one embodiment, the analysis of (a)(2) further comprises determining an interaction between FRIL and COIA1. In another embodiment, the analysis of (c)(2) further comprises determining an interaction between ALDOA and KIT.

[0011] In one embodiment, the analysis of (a)(1) comprises generating a plurality of transition ion pairs from the plurality of proteins of (a)(1) and measuring an abundance of at least one transition ion pair, wherein each transition ion measuring an abundance of at least one transition ion pair, wherein each transition ion pair consists of a precursor ion m/z and a fragment ion m/z, and wherein said plurality of transition ion pairs comprise at least 3 transitions selected from the group consisting of ALQASALK (SEQ ID NO: 65) transition pair 401.25-617.40, LGGPEAGLGEYLFER (SEQ ID NO: 66) transition pair 804.40-913.40, VEIFYR (SEQ ID NO: 67) transition pair 413.73-598.30, GFLLLASLR (SEQ ID NO: 68) transition pair 495.31-559.40, and AVGLAGTFR (SEQ ID NO: 69) transition pair (446.26-721.40).

[0012] In another embodiment, the analysis of (c)(1) comprises generating a plurality of transition ion pairs from the plurality of proteins of (c)(1) and measuring an abundance of at least one transition ion pair, wherein each transition ion pair consists of a precursor ion m/z and a fragment ion m/z, and wherein said plurality of transition ion pairs comprise at least 3 transitions selected from the group consisting of ALQASALK (SEQ ID NO: 65) transition pair 401.25-617.40, GFLLLASLR (SEQ ID NO: 68) transition pair 495.31-559.40, LGGPEAGLGEYLFER (SEQ ID NO: 66) transition pair 804.40-1083.60, and YVSELHLTR (SEQ ID NO: 70) transition pair.

[0013] In one aspect, the generating a plurality of transition ion pairs from the plurality of proteins of (a)(1) comprises fragmenting each protein into at least one peptide. In another aspect, the fragmenting comprises contacting each protein with a trypsin composition. In one embodiment, the assessing step of (a)(1) are performed by liquid chromatography-selected reaction monitoring mass spectrometry (LC-SRM-MS).

[0014] In one embodiment, the protein expression assessment of (a)(1) or (c)(1) is normalized with respect to the protein expression one or more proteins selected from the group consisting of PEDF, MASP1, GELS, LUM, C163A and PTPRJ.

[0015] In one embodiment, the transition ion pair assessment of (a)(1) is normalized with respect to the abundance of one or more transition ion pairs selected from the group consisting of LQSLFDSPDFSK (SEQ ID NO: 71) transition pair 692.34-593.30, TGVITSPDFPNPYPK (SEQ ID NO: 72) transition pair 816.92-258.10, TASDFITK (SEQ ID NO: 73) transition pair 441.73-710.40, SLEDLQLTHNK (SEQ ID NO: 74) transition pair 433.23-499.30, INPASLDK (SEQ ID NO: 75) transition pair 429.24-630.30 and VITEPIPVSDLR (SEQ ID NO: 76) transition pair 669.89-896.50.

[0016] In another embodiment, the classifying the pulmonary nodule of (b) further comprises determining a sensitivity, a specificity, a negative predictive value or a positive predictive value of the first score.

[0017] In one embodiment, the pulmonary nodule is classified in (b) as benign and wherein the subject does not receive treatment. In one aspect, the treatment comprises a pulmonary function test (PFT), pulmonary imaging, a biopsy, a surgery, a chemotherapy, a radiotherapy, or any combination thereof. The pulmonary imaging is an x-ray, a chest computed tomography (CT) scan, or a positron emission tomography (PET) scan.

[0018] In one embodiment, the pulmonary nodule is benign and wherein the subject receives periodic monitoring for between 1 year and 3 years.

[0019] In one embodiment, the periodic monitoring comprises chest computed tomography.

[0020] In one embodiment, the pulmonary nodule is malignant and wherein the subject receives treatment according to the standard of care. The treatment comprises a pulmonary function test (PFT), pulmonary imaging, a biopsy, a surgery, a chemotherapy, a radiotherapy, or any combination thereof. The pulmonary imaging is an x-ray, a chest computed tomography (CT) scan, or a positron emission tomography (PET) scan.

[0021] In one embodiment, the generating a plurality of transition ion pairs from the plurality of proteins of (c)(1) comprises fragmenting each protein into at least one peptide. The fragmenting comprises contacting each protein with a trypsin composition.

[0022] In one embodiment, the assessing step of (c)(1) are performed by liquid chromatography-selected reaction monitoring mass spectrometry (LC-SRM-MS).

[0023] In one embodiment, the at least one peptide is labeled. In one embodiment, the label is an isotopic label.

### BRIEF DESCRIPTION OF THE DRAWINGS

[0024] FIGS. 1A and 1B depict flowcharts that describe one embodiment for use of Xpresys® Lung CR, a combined rule-out classifier and a rule-in classifier test (combined T_{RO} and T_{RI}). FIG. 1B is a flowchart describing the intended use of Xpresys® Lung CR. Note that Xpresys® Lung (Classifier 1; T_{RO}) is a component of Xpresys® Lung CR. Xpresys® Lung CR is validated if the cancer fraction in the Likely Cancer group is significantly higher than the cancer fraction in the Likely Benign group at predetermined thresholds of Classifier 2.

[0025] FIG. 2 is a graph that depicts raw and fitted ROC curves of Xpresys® Lung (Classifier 1; Rule-Out Classifier). The shaded area is the corresponding partial AUC bounded by a sensitivity of 0.8. The open circle corresponds to the original validated threshold of 0.47. The open square corresponds to the new validated threshold of 0.50.

[0026] FIG. 3 is a graph that depicts Raw and fitted ROC curves of Classifier 2 (Reflex Lung; Rule-in Classifier) on the 68 Indeterminate I samples.

[0027] FIG. 4 is a graph that depicts the pre- and post-test cancer risk of the intended use population for Xpresys® Lung CR.

[0028] FIG. 5 is a flowchart that describes the Reflex Lung Classifier (Rule-in; Classifier 2) study process.

[0029] FIG. 6 is a graph that depicts the performance of the protein panels in Classifier 2 as a function of partial Area Under the Curve (pAUC).

[0030] FIG. 7 is a Receiver Operating Characteristic (ROC) graph that depicts the performance of select protein panels in Classifier 2 containing ENPL, and those protein panels that do not contain ENPL.

[0031] FIG. 8 is a graph that depicts the performance of a rule-in classifier, Model 1 protein classifier, in terms of positive predictive value (PPV) and Sensitivity.

[0032] FIG. 9 is a graph that depicts the performance of a rule-in classifier, Model 2 protein classifier, in terms of PPV and Sensitivity.

[0033] FIG. 10 is a graph that depicts the performance of a rule-in classifier, Model 3 protein classifier, in terms of PPV and Sensitivity.

[0034] FIG. 11 is a graph that depicts the performance of a rule-in classifier, Model 4 protein classifier, in terms of PPV and Sensitivity.

[0035] FIG. 12 is a ROC graph that depicts the performance of the protein classifier Models with samples that classified as Indeterminate by the Xpresys® Lung rule-out classifier.

[0036] FIG. 13 are a series of graphs that depict the PPV and Sensitivity of Model 1, and the Cross validated performance of Model 1.

[0037] FIG. 14 are a series of graphs that depict the PPV and Sensitivity of Model 2, and the Cross validated performance of Model 2.

[0038] FIG. 15 are a series of graphs that depict the PPV and Sensitivity of Model 3, and the Cross validated performance of Model 3.

[0039] FIG. 16 are a series of graphs that depict the PPV and Sensitivity of Model 4, and the Cross validated performance of Model 4.

[0040] FIG. 17 is a schematic that depicts laboratory workflow, from sample collection to establishing test result.

### DETAILED DESCRIPTION

[0041] The disclosed invention derives from the surprising discovery, that in patients presenting with pulmonary nodule(s), protein markers in the blood exist that specifically identify and classify lung cancer. Accordingly, the invention provides unique advantages to the patient associated with early detection of lung cancer in a patient, including increased life span, decreased morbidity and mortality, decreased exposure to radiation during screening and repeat screenings and a minimally invasive diagnostic model. Importantly, the methods of the invention allow for a patient to avoid invasive procedures.

[0042] The routine clinical use of chest computed tomography (CT) scans identifies millions of pulmonary nodules annually, of which only a small minority are malignant but contribute to the dismal 15% five-year survival rate for patients diagnosed with non-small cell lung cancer (NSCLC). The early diagnosis of lung cancer in patients with pulmonary nodules is a top priority, as decision-making based on clinical presentation, in conjunction with current non-invasive diagnostic options such as chest CT and positron emission tomography (PET) scans, and other invasive alternatives, has not altered the clinical outcomes of patients with Stage I NSCLC. The subgroup of pulmonary nodules between 8 mm and 20 mm in size is increasingly recognized as being “intermediate” relative to the lower rate of malignancies below 8 mm and the higher rate of malignancies above 20 mm. Invasive sampling of the lung nodule by biopsy using transthoracic needle aspiration or bronchoscopy may provide a cytopathologic diagnosis of NSCLC, but are also associated with both false-negative and non-diagnostic results. In summary, a key unmet clinical need for the management of pulmonary nodules is a non-invasive diagnostic test that discriminates between malignant and benign processes in patients with indeterminate pulmonary nodules (IPNs).

[0043] The clinical decision to be more or less aggressive in treatment is based on risk factors, primarily nodule size, smoking history and age in addition to imaging. As these are not conclusive, there is a great need for a molecular-based blood test that would be both non-invasive and provide complementary information to risk factors and imaging.

[0044] Accordingly, these and related embodiments will find uses in screening methods for lung conditions, and particularly lung cancer diagnostics. More importantly, the invention finds use in determining the clinical management of a patient. That is, the method of invention is useful in ruling in or ruling out a particular treatment protocol for an individual subject.

[0045] Cancer biology requires a molecular strategy to address the unmet medical need for an assessment of lung cancer risk. The field of diagnostic medicine has evolved with technology and assays that provide sensitive mechanisms for detection of changes in proteins. The methods described herein use a LC-SRM-MS technology for measuring the concentration of blood plasma proteins that are collectively changed in patients with a malignant PN. This protein signature is indicative of lung cancer. LC-SRM-MS is one method that provides for both quantification and identification of circulating proteins in plasma. Changes in protein expression levels, such as but not limited to signaling factors, growth factors, cleaved surface proteins and secreted proteins, can be detected using such a sensitive technology to assay cancer. Presented herein is a blood-based classification test to determine the likelihood that a patient presenting with a pulmonary nodule has a nodule that is benign or malignant. The present invention presents a classification algorithm that predicts the relative likelihood of the PN being benign or malignant.

[0046] More broadly, it is demonstrated that there are many variations on this invention that are also diagnostic tests for the likelihood that a PN is benign or malignant. These are variations on the panel of proteins, protein standards, measurement methodology and/or classification algorithm.

[0047] As disclosed herein, archival plasma samples from subjects presenting with PNs were analyzed for differential protein expression by mass spectrometry and the results were used to identify biomarker proteins and panels of biomarker proteins that are differentially expressed in conjunction with various lung conditions (cancer vs. non-cancer).

[0048] These assays resulted in the development of a rule-in classifier (referred to herein as “Reflex Lung”, and “Classifier 2”) that is able to determine the probability of a pulmonary nodule as being cancerous. In one aspect, the rule-in classifier is meant to be used with a previously developed rule-out classifier (Xpresys® Lung) described in U.S. Pat. No. 9,297,805, the contents of which are incorporated herein in its entirety. Xpresys® Lung CR (Cancer Risk) is an assay with the combined use of the rule-out classifier and the rule-in classifier.

[0049] In one embodiment, a preferred panel for ruling-in treatment for a subject is listed in Table 10 and Table 12. In various other embodiments, the panels according to the invention include measuring at least 2, 3, 4, 5, 6, 7, or more of the proteins listed on Table 2. In one embodiment, normalizing proteins listed in Table 10 are also measured.

[0050] The term “pulmonary nodules” (PNs) refers to lung lesions that can be visualized by radiographic techniques. A pulmonary nodule is any nodules less than or equal to three centimeters in diameter. In one example, a pulmonary nodule has a diameter of about 0.8 cm to 2 cm.

[0051] The term “masses” or “pulmonary masses” refers to lung nodules that are greater than three centimeters maximal diameter.

[0052] The term “blood biopsy” refers to a diagnostic study of the blood to determine whether a patient presenting with a nodule has a condition that may be classified as either benign or malignant.

[0053] The term “acceptance criteria” refers to the set of criteria to which an assay, test, diagnostic or product should conform to be considered acceptable for its intended use. As used herein, acceptance criteria are a list of tests, references to analytical procedures, and appropriate measures, which are defined for an assay or product that will be used in a diagnostic. For example, the acceptance criteria for the classifier refers to a set of predetermined ranges of coefficients.

[0054] The term “average maximal AUC” refers to the methodology of calculating performance. For the present invention, in the process of defining the set of proteins that should be in a panel by forward or backwards selection proteins are removed or added one at a time. A plot can be generated with performance (AUC or partial AUC score on the Y axis and proteins on the X axis) the point which maximizes performance indicates the number and set of proteins the gives the best result.

[0055] The term “partial AUC factor or pAUC factor” is greater than expected by random prediction. At sensitivity=0.90 the pAUC factor is the trapezoidal area under the ROC curve from 0.9 to 1.0 Specificity/(0.1*0.1/2).

[0056] The term “incremental information” refers to information that may be used with other diagnostic information to enhance diagnostic accuracy. Incremental information is independent of clinical factors such as including nodule size, age, or gender.

[0057] The term “score” or “scoring” refers to calculating a probability likelihood for a sample. For the present invention, values closer to 1.0 are used to represent the likelihood that a sample is cancer, values closer to 0.0 represent the likelihood that a sample is benign.

[0058] The term “robust” refers to a test or procedure that is not seriously disturbed by violations of the assumptions on which it is based. For the present invention, a robust test is a test wherein the proteins or transitions of the mass spectrometry chromatograms have been manually reviewed and are “generally” free of interfering signals.

[0059] The term “coefficients” refers to the weight assigned to each protein used to in the logistic regression equation to score a sample.

[0060] In certain embodiments of the invention, it is contemplated that in terms of the logistic regression model of MC CV, the model coefficient and the coefficient of variation (CV) of each protein's model coefficient may increase or decrease, dependent upon the method (or model) of measurement of the protein classifier. For each of the listed proteins in the panels, there is about, at least, at least about, or at most about a 2-, 3-, 4-, 5-, 6-, 7-, 8-, 9-, or 10-, -fold or any range derivable therein for each of the coefficient and CV. Alternatively, it is contemplated that quantitative embodiments of the invention may be discussed in terms of as about, at least, at least about, or at most about 10, 20, 30, 40, 50, 51, 52, 53, 54, 55, 56, 57, 58, 59, 60, 61, 62, 63, 64, 65, 66, 67, 68, 69, 70, 71, 72, 73, 74, 75, 76, 77, 78, 79, 80, 81, 82, 83, 84, 85, 86, 87, 88, 89, 90, 91, 92, 93, 94, 95, 96, 97, 98, 99% or more, or any range derivable therein.

[0061] The term “best team players” refers to the proteins that rank the best in the random panel selection algorithm, i.e., perform well on panels. When combined into a classifier these proteins can segregate cancer from benign samples. “Best team player” proteins is synonymous with “cooperative proteins”. The term “cooperative proteins” refers proteins that appear more frequently on high performing panels of proteins than expected by chance. This gives rise to a protein's cooperative score which measures how (in)frequently it appears on high performing panels. For example, a protein with a cooperative score of 1.5 appears on high performing panels 1.5× more than would be expected by chance alone.

[0062] The term “classifying” as used herein with regard to a lung condition refers to the act of compiling and analyzing expression data for using statistical techniques to provide a classification to aid in diagnosis of a lung condition, particularly lung cancer.

[0063] The term “classifier” as used herein refers to an algorithm that discriminates between disease states with a predetermined level of statistical significance. A two-class classifier is an algorithm that uses data points from measurements from a sample and classifies the data into one of two groups. In certain embodiments, the data used in the classifier is the relative expression of proteins in a biological sample. Protein expression levels in a subject can be compared to levels in patients previously diagnosed as disease free or with a specified condition.

[0064] The “classifier” maximizes the probability of distinguishing a randomly selected cancer sample from a randomly selected benign sample, i.e., the AUC of ROC curve.

[0065] In addition to the classifier's constituent proteins with differential expression, it may also include proteins with minimal or no biologic variation to enable assessment of variability, or the lack thereof, within or between clinical specimens; these proteins may be termed endogenous proteins and serve as internal controls for the other classifier proteins.

[0066] The term “normalization” or “normalizer” as used herein refers to the expression of a differential value in terms of a standard value to adjust for effects which arise from technical variation due to sample handling, sample preparation and mass spectrometry measurement rather than biological variation of protein concentration in a sample. For example, when measuring the expression of a differentially expressed protein, the absolute value for the expression of the protein can be expressed in terms of an absolute value for the expression of a standard protein that is substantially constant in expression. This prevents the technical variation of sample preparation and mass spectrometry measurement from impeding the measurement of protein concentration levels in the sample.

[0067] The term “condition” as used herein refers generally to a disease, event, or change in health status.

[0068] The term “treatment protocol” as used herein including further diagnostic testing typically performed to determine whether a pulmonary nodule is benign or malignant. Treatment protocols include diagnostic tests typically used to diagnose pulmonary nodules or masses such as for example, CT scan, positron emission tomography (PET) scan, bronchoscopy or tissue biopsy. Treatment protocol as used herein is also meant to include therapeutic treatments typically used to treat malignant pulmonary nodules and/or lung cancer such as for example, chemotherapy, radiation or surgery.

[0069] The terms “diagnosis” and “diagnostics” also encompass the terms “prognosis” and “prognostics”, respectively, as well as the applications of such procedures over two or more time points to monitor the diagnosis and/or prognosis over time, and statistical modeling based thereupon. Furthermore the term diagnosis includes: a. prediction (determining if a patient will likely develop a hyperproliferative disease); b. prognosis (predicting whether a patient will likely have a better or worse outcome at a pre-selected time in the future); c. therapy selection; d. therapeutic drug monitoring; and e. relapse monitoring.

[0070] In some embodiments, for example, classification of a biological sample as being derived from a subject with a lung condition may refer to the results and related reports generated by a laboratory, while diagnosis may refer to the act of a medical professional in using the classification to identify or verify the lung condition.

[0071] The term “providing” as used herein with regard to a biological sample refers to directly or indirectly obtaining the biological sample from a subject. For example, “providing” may refer to the act of directly obtaining the biological sample from a subject (e.g., by a blood draw, tissue biopsy, lavage and the like). Likewise, “providing” may refer to the act of indirectly obtaining the biological sample. For example, providing may refer to the act of a laboratory receiving the sample from the party that directly obtained the sample, or to the act of obtaining the sample from an archive.

[0072] As used herein, “lung cancer” preferably refers to cancers of the lung, but may include any disease or other disorder of the respiratory system of a human or other mammal. Respiratory neoplastic disorders include, for example small cell carcinoma or small cell lung cancer (SCLC), non-small cell carcinoma or non-small cell lung cancer (NSCLC), squamous cell carcinoma, adenocarcinoma, broncho-alveolar carcinoma, mixed pulmonary carcinoma, malignant pleural mesothelioma, undifferentiated large cell carcinoma, giant cell carcinoma, synchronous tumors, large cell neuroendocrine carcinoma, adenosquamous carcinoma, undifferentiated carcinoma; and small cell carcinoma, including oat cell cancer, mixed small cell/large cell carcinoma, and combined small cell carcinoma; as well as adenoid cystic carcinoma, hamartomas, mucoepidermoid tumors, typical carcinoid lung tumors, atypical carcinoid lung tumors, peripheral carcinoid lung tumors, central carcinoid lung tumors, pleural mesotheliomas, and undifferentiated pulmonary carcinoma and cancers that originate outside the lungs such as secondary cancers that have metastasized to the lungs from other parts of the body. Lung cancers may be of any stage or grade. Preferably the term may be used to refer collectively to any dysplasia, hyperplasia, neoplasia, or metastasis in which the protein biomarkers expressed above normal levels as may be determined, for example, by comparison to adjacent healthy tissue.

[0073] Examples of non-cancerous lung condition include chronic obstructive pulmonary disease (COPD), benign tumors or masses of cells (e.g., hamartoma, fibroma, neurofibroma), granuloma, sarcoidosis, and infections caused by bacterial (e.g., tuberculosis) or fungal (e.g. histoplasmosis) pathogens. In certain embodiments, a lung condition may be associated with the appearance of radiographic PNs.

[0074] As used herein, “lung tissue”, and “lung cancer” refer to tissue or cancer, respectively, of the lungs themselves, as well as the tissue adjacent to and/or within the strata underlying the lungs and supporting structures such as the pleura, intercostal muscles, ribs, and other elements of the respiratory system. The respiratory system itself is taken in this context as representing nasal cavity, sinuses, pharynx, larynx, trachea, bronchi, lungs, lung lobes, aveoli, aveolar ducts, aveolar sacs, aveolar capillaries, bronchioles, respiratory bronchioles, visceral pleura, parietal pleura, pleural cavity, diaphragm, epiglottis, adenoids, tonsils, mouth and tongue, and the like. The tissue or cancer may be from a mammal and is preferably from a human, although monkeys, apes, cats, dogs, cows, horses and rabbits are within the scope of the present invention. The term “lung condition” as used herein refers to a disease, event, or change in health status relating to the lung, including for example lung cancer and various non-cancerous conditions.

[0075] “Accuracy” refers to the degree of conformity of a measured or calculated quantity (a test reported value) to its actual (or true) value. Clinical accuracy relates to the proportion of true outcomes (true positives (TP) or true negatives (TN) versus misclassified outcomes (false positives (FP) or false negatives (FN)), and may be stated as a sensitivity, specificity, positive predictive values (PPV) or negative predictive values (NPV), or as a likelihood, odds ratio, among other measures.

[0076] The term “biological sample” as used herein refers to any sample of biological origin potentially containing one or more biomarker proteins. Examples of biological samples include tissue, organs, or bodily fluids such as whole blood, plasma, serum, tissue, lavage or any other specimen used for detection of disease.

[0077] The term “subject” as used herein refers to a mammal, preferably a human.

[0078] The term “biomarker protein” as used herein refers to a polypeptide in a biological sample from a subject with a lung condition versus a biological sample from a control subject. A biomarker protein includes not only the polypeptide itself, but also minor variations thereof, including for example one or more amino acid substitutions or modifications such as glycosylation or phosphorylation.

[0079] The term “biomarker protein panel” as used herein refers to a plurality of biomarker proteins. In certain embodiments, the expression levels of the proteins in the panels can be correlated with the existence of a lung condition in a subject. In certain embodiments, biomarker protein panels comprise 2, 3, 4, 5, 6, 7, 8, 9, 10, 11, 12, 13, 14, 15, 16, 17, 18, 19, 20, 21, 22, 23, 24, 25, 26, 27, 28, 29, 30, 31, 32, 33, 34, 35, 36, 37, 38, 39, 40, 41, 42, 43, 44, 45, 46, 47, 48, 49, 50, 60, 70, 80, 90 or 100 proteins. In certain embodiments, the biomarker proteins panels comprise from 100-125 proteins, 125-150 proteins, 150-200 proteins or more.

[0080] “Treating” or “treatment” as used herein with regard to a condition may refer to preventing the condition, slowing the onset or rate of development of the condition, reducing the risk of developing the condition, preventing or delaying the development of symptoms associated with the condition, reducing or ending symptoms associated with the condition, generating a complete or partial regression of the condition, or some combination thereof.

[0081] The term “ruling out” as used herein is meant that the subject is selected not to receive a treatment protocol.

[0082] The term “ruling-in” as used herein is meant that the subject is selected to receive a treatment protocol.

[0083] Biomarker levels may change due to treatment of the disease. The changes in biomarker levels may be measured by the present invention. Changes in biomarker levels may be used to monitor the progression of disease or therapy.

[0084] “Altered”, “changed” or “significantly different” refer to a detectable change or difference from a reasonably comparable state, profile, measurement, or the like. One skilled in the art should be able to determine a reasonable measurable change. Such changes may be all or none. They may be incremental and need not be linear. They may be by orders of magnitude. A change may be an increase or decrease by 1%, 5%, 10%, 20%, 30%, 40%, 50%, 60%, 70%, 80%, 90%, 95%, 99%, 100%, or more, or any value in between 0% and 100%. Alternatively the change may be 1-fold, 1.5-fold 2-fold, 3-fold, 4-fold, 5-fold or more, or any values in between 1-fold and five-fold. The change may be statistically significant with a p value of 0.1, 0.05, 0.001, or 0.0001.

[0085] Using the methods of the current invention, a clinical assessment of a patient is first performed. If there exists is a higher likelihood for cancer, the clinician may rule in the disease which will require the pursuit of diagnostic testing options yielding data which increase and/or substantiate the likelihood of the diagnosis. “Rule in” of a disease requires a test with a high specificity.

[0086] “FN” is false negative, which for a disease state test means classifying a disease subject incorrectly as non-disease or normal.

[0087] “FP” is false positive, which for a disease state test means classifying a normal subject incorrectly as having disease.

[0088] The term “rule in” refers to a diagnostic test with high specificity that coupled with a clinical assessment indicates a higher likelihood for cancer. If the clinical assessment is a lower likelihood for cancer, the clinician may adopt a stance to rule out the disease, which will require diagnostic tests which yield data that decrease the likelihood of the diagnosis. “Rule out” requires a test with a high sensitivity.

[0089] The term “rule out” refers to a diagnostic test with high sensitivity that coupled with a clinical assessment indicates a lower likelihood for cancer.

[0090] The term “sensitivity of a test” refers to the probability that a patient with the disease will have a positive test result. This is derived from the number of patients with the disease who have a positive test result (true positive) divided by the total number of patients with the disease, including those with true positive results and those patients with the disease who have a negative result, i.e. false negative.

[0091] The term “specificity of a test” refers to the probability that a patient without the disease will have a negative test result. This is derived from the number of patients without the disease who have a negative test result (true negative) divided by all patients without the disease, including those with a true negative result and those patients without the disease who have a positive test result, e.g. false positive. While the sensitivity, specificity, true or false positive rate, and true or false negative rate of a test provide an indication of a test's performance, e.g. relative to other tests, to make a clinical decision for an individual patient based on the test's result, the clinician requires performance parameters of the test with respect to a given population.

[0092] The term “positive predictive value” (PPV) refers to the probability that a positive result correctly identifies a patient who has the disease, which is the number of true positives divided by the sum of true positives and false positives.

[0093] The term “negative predictive value” or “NPV” is calculated by TN/(TN+FN) or the true negative fraction of all negative test results. It also is inherently impacted by the prevalence of the disease and pre-test probability of the population intended to be tested.

[0094] The term “disease prevalence” refers to the number of all new and old cases of a disease or occurrences of an event during a particular period. Prevalence is expressed as a ratio in which the number of events is the numerator and the population at risk is the denominator.

[0095] The term disease incidence refers to a measure of the risk of developing some new condition within a specified period of time; the number of new cases during some time period, it is better expressed as a proportion or a rate with a denominator.

[0096] Lung cancer risk according to the “National Lung Screening Trial” is classified by age and smoking history. High risk—age≧55 and ≧30 pack-years smoking history; Moderate risk—age≧50 and ≧20 pack-years smoking history; Low risk—<age 50 or <20 pack-years smoking history.

[0097] The term “negative predictive value” (NPV) refers to the probability that a negative test correctly identifies a patient without the disease, which is the number of true negatives divided by the sum of true negatives and false negatives. A positive result from a test with a sufficient PPV can be used to rule in the disease for a patient, while a negative result from a test with a sufficient NPV can be used to rule out the disease, if the disease prevalence for the given population, of which the patient can be considered a part, is known.

[0098] The clinician must decide on using a diagnostic test based on its intrinsic performance parameters, including sensitivity and specificity, and on its extrinsic performance parameters, such as positive predictive value and negative predictive value, which depend upon the disease's prevalence in a given population.

[0099] Additional parameters which may influence clinical assessment of disease likelihood include the prior frequency and closeness of a patient to a known agent, e.g. exposure risk, that directly or indirectly is associated with disease causation, e.g. second hand smoke, radiation, etc., and also the radiographic appearance or characterization of the pulmonary nodule exclusive of size. A nodule's description may include solid, semi-solid or ground glass which characterizes it based on the spectrum of relative gray scale density employed by the CT scan technology.

[0100] “Mass spectrometry” refers to a method comprising employing an ionization source to generate gas phase ions from an analyte presented on a sample presenting surface of a probe and detecting the gas phase ions with a mass spectrometer. In one embodiment, liquid chromatography selected reaction monitoring mass spectrometry (LC-SRM-MS) is used. In another embodiment, liquid chromatography, multiple reaction monitoring mass spectrometry (LC-MRM-MS) is used.

[0101] Bioinformatic and biostatistical analyses were used first to identify individual proteins with statistically significant differential expression, and then using these proteins to derive one or more combinations of proteins or panels of proteins, which collectively demonstrated superior discriminatory performance compared to any individual protein. Bioinformatic and biostatistical methods are used to derive coefficients (C) for each individual protein in the panel that reflects its relative expression level, i.e. increased or decreased, and its weight or importance with respect to the panel's net discriminatory ability, relative to the other proteins. The quantitative discriminatory ability of the panel can be expressed as a mathematical algorithm with a term for each of its constituent proteins being the product of its coefficient and the protein's plasma expression level (P) (as measured by LC-SRM-MS), e.g. C×P, with an algorithm consisting of n proteins described as: C1×P1+C2×P2+C3×P3+ . . . +Cn×Pn. An algorithm that discriminates between disease states with a predetermined level of statistical significance may be refers to a “disease classifier”. In addition to the classifier's constituent proteins with differential expression, it may also include proteins with minimal or no biologic variation to enable assessment of variability, or the lack thereof, within or between clinical specimens; these proteins may be termed typical native proteins and serve as internal controls for the other classifier proteins.

[0102] In certain embodiments, expression levels are measured by MS. MS analyzes the mass spectrum produced by an ion after its production by the vaporization of its parent protein and its separation from other ions based on its mass-to-charge ratio. The most common modes of acquiring MS data are 1) full scan acquisition resulting in the typical total ion current plot (TIC), 2) selected ion monitoring (SIM), and 3) selected reaction monitoring (SRM).

[0103] In certain embodiments of the methods provided herein, biomarker protein expression levels are measured by LC-SRM-MS. LC-SRM-MS is a highly selective method of tandem mass spectrometry which has the potential to effectively filter out all molecules and contaminants except the desired analyte(s). This is particularly beneficial if the analysis sample is a complex mixture which may comprise several isobaric species within a defined analytical window. LC-SRM-MS methods may utilize a triple quadrupole mass spectrometer which, as is known in the art, includes three quadrupole rod sets. A first stage of mass selection is performed in the first quadrupole rod set, and the selectively transmitted ions are fragmented in the second quadrupole rod set. The resultant transition (product) ions are conveyed to the third quadrupole rod set, which performs a second stage of mass selection. The product ions transmitted through the third quadrupole rod set are measured by a detector, which generates a signal representative of the numbers of selectively transmitted product ions. The RF and DC potentials applied to the first and third quadrupoles are tuned to select (respectively) precursor and product ions that have m/z values lying within narrow specified ranges. By specifying the appropriate transitions (m/z values of precursor and product ions), a peptide corresponding to a targeted protein may be measured with high degrees of sensitivity and selectivity. Signal-to-noise ratio is superior to conventional tandem mass spectrometry (MS/MS) experiments, which select one mass window in the first quadrupole and then measure all generated transitions in the ion detector.

[0104] The expression level of a biomarker protein can be measured using any suitable method known in the art, including but not limited to mass spectrometry (MS), reverse transcriptase-polymerase chain reaction (RT-PCR), microarray, serial analysis of gene expression (SAGE), gene expression analysis by massively parallel signature sequencing (MPSS), immunoassays (e.g., ELISA), immunohistochemistry (IHC), transcriptomics, and proteomics.

[0105] To evaluate the diagnostic performance of a particular set of peptide transitions, a ROC curve is generated for each significant transition.

[0106] An “ROC curve” as used herein refers to a plot of the true positive rate (sensitivity) against the false positive rate (specificity) for a binary classifier system as its discrimination threshold is varied. A ROC curve can be represented equivalently by plotting the fraction of true positives out of the positives (TPR=true positive rate) versus the fraction of false positives out of the negatives (FPR=false positive rate). Each point on the ROC curve represents a sensitivity/specificity pair corresponding to a particular decision threshold. FIGS. 10 and 12 provide a graphical representation of the functional relationship between the distribution of biomarker or biomarker panel sensitivity and specificity values in a cohort of diseased subjects and in a cohort of non-diseased subjects.

[0107] AUC represents the area under the ROC curve. The AUC is an overall indication of the diagnostic accuracy of 1) a biomarker or a panel of biomarkers and 2) a ROC curve. AUC is determined by the “trapezoidal rule.” For a given curve, the data points are connected by straight line segments, perpendiculars are erected from the abscissa to each data point, and the sum of the areas of the triangles and trapezoids so constructed is computed. In certain embodiments of the methods provided herein, a biomarker protein has an AUC in the range of about 0.75 to 1.0. In certain of these embodiments, the AUC is in the range of about 0.8 to 0.8, 0.9 to 0.95, or 0.95 to 1.0.

[0108] The methods provided herein are minimally invasive and pose little or no risk of adverse effects. As such, they may be used to diagnose, monitor and provide clinical management of subjects who do not exhibit any symptoms of a lung condition and subjects classified as low risk for developing a lung condition. For example, the methods disclosed herein may be used to diagnose lung cancer in a subject who does not present with a PN and/or has not presented with a PN in the past, but who nonetheless deemed at risk of developing a PN and/or a lung condition. Similarly, the methods disclosed herein may be used as a strictly precautionary measure to diagnose healthy subjects who are classified as low risk for developing a lung condition.

[0109] The present invention provides a method of determining the likelihood that a lung condition in a subject is cancer by measuring an abundance of a panel of proteins in a sample obtained from the subject; calculating a probability of cancer score based on the protein measurements and ruling out cancer for the subject if the score) is lower than a pre-determined score, wherein when cancer is ruled out the subject does not receive a treatment protocol. Treatment protocols include for example pulmonary function test (PFT), pulmonary imaging, a biopsy, a surgery, a chemotherapy, a radiotherapy, or any combination thereof. In some embodiments, the imaging is an x-ray, a chest computed tomography (CT) scan, or a positron emission tomography (PET) scan.

[0110] The present invention further provides a method of ruling in the likelihood of cancer for a subject by measuring an abundance of panel of proteins in a sample obtained from the subject, calculating a probability of cancer score based on the protein measurements and ruling in the likelihood of cancer for the subject if the score in step is higher than a pre-determined score.

[0111] In another aspect the invention further provides a method of determining the likelihood of the presence of a lung condition in a subject by measuring an abundance of panel of proteins in a sample obtained from the subject, calculating a probability of cancer score based on the protein measurements and concluding the presence of said lung condition if the score is equal or greater than a pre-determined score. The lung condition is lung cancer such as for example, non-small cell lung cancer (NSCLC). The subject at risk of developing lung cancer.

[0112] The subject has or is suspected of having a pulmonary nodule. The pulmonary nodule has a diameter of less than or equal to 3 cm. In one embodiment, the pulmonary nodule has a diameter of about 0.8 cm to 3.0 cm. The subject may have stage IA lung cancer (i.e., the tumor is smaller than 3 cm).

[0113] The score is calculated from a logistic regression model applied to the protein measurements. For example, the score is determined as Pₛ=1/[1+exp(−α−Σᵢ₌₁^{N}βᵢ*\check{I}_{i,s})], where \check{I}_{i,s} is logarithmically transformed and normalized intensity of transition i in said sample (s), βᵢ is the corresponding logistic regression coefficient, α was a panel-specific constant, and N was the total number of transitions in said panel.

[0114] In various embodiments, the method of the present invention further comprises normalizing the protein measurements. For example, the protein measurements are normalized by one or more proteins selected from PEDF, MASP1, GELS, LUM, C163A and PTPRJ.

[0115] The biological sample such as for example tissue, blood, plasma, serum, whole blood, urine, saliva, genital secretion, cerebrospinal fluid, sweat and excreta.

[0116] In one aspect, the determining the likelihood of cancer is determined by the sensitivity, specificity, negative predictive value or positive predictive value associated with the score. The score determined has a negative predictive value (NPV) is at least about 60%, at least 70% or at least 80%.

[0117] The measuring step is performed by selected reaction monitoring mass spectrometry, using a compound that specifically binds the protein being detected or a peptide transition. In one embodiment, the compound that specifically binds to the protein being measured is an antibody or an aptamer.

[0118] In certain embodiments, the diagnostic methods disclosed herein can be used in combination with other clinical assessment methods, including for example various radiographic and/or invasive methods. Similarly, in certain embodiments, the diagnostic methods disclosed herein can be used to identify candidates for other clinical assessment methods, or to assess the likelihood that a subject will benefit from other clinical assessment methods.

[0119] The high abundance of certain proteins in a biological sample such as plasma or serum can hinder the ability to assay a protein of interest, particularly where the protein of interest is expressed at relatively low concentrations. Several methods are available to circumvent this issue, including enrichment, separation, and depletion. Enrichment uses an affinity agent to extract proteins from the sample by class, e.g., removal of glycosylated proteins by glycocapture. Separation uses methods such as gel electrophoresis or isoelectric focusing to divide the sample into multiple fractions that largely do not overlap in protein content. Depletion typically uses affinity columns to remove the most abundant proteins in blood, such as albumin, by utilizing advanced technologies such as IgY14/Supermix (SigmaSt. Louis, Mo.) that enable the removal of the majority of the most abundant proteins.

[0120] In certain embodiments of the methods provided herein, a biological sample may be subjected to enrichment, separation, and/or depletion prior to assaying biomarker or putative biomarker protein expression levels. In certain of these embodiments, blood proteins may be initially processed by a glycocapture method, which enriches for glycosylated proteins, allowing quantification assays to detect proteins in the high pg/ml to low ng/ml concentration range. Exemplary methods of glycocapture are well known in the art (see, e.g., U.S. Pat. No. 7,183,188; U.S. Patent Appl. Publ. No. 2007/0099251; U.S. Patent Appl. Publ. No. 2007/0202539; U.S. Patent Appl. Publ. No. 2007/0269895; and U.S. Patent Appl. Publ. No. 2010/0279382). In other embodiments, blood proteins may be initially processed by a protein depletion method, which allows for detection of commonly obscured biomarkers in samples by removing abundant proteins. In one such embodiment, the protein depletion method is a Supermix (Sigma) depletion method.

[0121] In certain embodiments, stable isotope-labeled standard peptides (SIL) are used as normalizing peptides, according to U.S. Ser. No. 14/612,959 and Li et al. “An integrated quantification method to increase the precision, robustness, and resolution of protein measurement in human plasma samples,” Clinical Proteomics, 2015, 12:3, pages, 2-17, the contents of each of which are incorporated herein in their entireties.

[0122] In certain embodiments, a biomarker protein panel comprises two to 100 biomarker proteins. In certain of these embodiments, the panel comprises 2 to 5, 6 to 10, 11 to 15, 16 to 20, 21-25, 5 to 25, 26 to 30, 31 to 40, 41 to 50, 25 to 50, 51 to 75, 76 to 100, biomarker proteins. In certain embodiments, a biomarker protein panel comprises one or more subpanels of biomarker proteins that each comprise at least two biomarker proteins. For example, biomarker protein panel may comprise a first subpanel made up of biomarker proteins that are overexpressed in a particular lung condition and a second subpanel made up of biomarker proteins that are under-expressed in a particular lung condition.

[0123] In certain embodiments, kits are provided for diagnosing a lung condition in a subject. These kits are used to detect expression levels of one or more biomarker proteins. Optionally, a kit may comprise instructions for use in the form of a label or a separate insert. The kits can contain reagents that specifically bind to proteins in the panels described, herein. These reagents can include antibodies. The kits can also contain reagents that specifically bind to mRNA expressing proteins in the panels described, herein. These reagents can include nucleotide probes. The kits can also include reagents for the detection of reagents that specifically bind to the proteins in the panels described herein. These reagents can include fluorophores.

[0124] The following examples are provided to better illustrate the claimed invention and are not to be interpreted as limiting the scope of the invention. To the extent that specific materials are mentioned, it is merely for purposes of illustration and is not intended to limit the invention. One skilled in the art may develop equivalent means or reactants without the exercise of inventive capacity and without departing from the scope of the invention.

### Examples

### Example 1: Development of the Xpresys Lung CR (Combination Rule-Out(T_{RO}) and Rule-in Classifier(T_{RI}))

[0125] Described herein is the development of the Xpresys® Lung CR test. The Xpresys® Lung CR test comprises a rule-out classifier (Classifier 1; T_{RO}) and a rule-in classifier (Classifier 2; T_{RI}). See FIGS. 1A and 1B. The rule-out classifier (T_{RO}) is described in U.S. Pat. No. 9,297,805, the contents of which are incorporated herein in its entirety by reference. In one embodiment, peptides of the T_{RO} and T_{RI} are assayed by LC-MRM-MS or LC-SRM-MS.

[0126] The previously described rule-out classifier (also referred to herein as Xpresys® Lung; T_{RO}) is a plasma test that aims to rescue benign lung nodules from unnecessary invasive procedure. The proteins, transitions and corresponding coefficients of the T_{RO} classifier are detailed in Table 1. Based on the data described in U.S. Pat. No. 9,297,805, and the estimated cancer prevalence of 23.1% among lung nodules of 8-30 mm in size, the T_{RO} classifier is expected to classify 43.9% of the intended use population (i.e. individuals at least 40 years of age and with a pulmonary nodule between 8-30 mm in size as detected by radiology) as Likely Benign with a negative predictive value (NPV) of 84.0% or higher. Subjects having a Likely Benign test result should be monitored by surveillance according to current nodule management guidelines for patients of low cancer risk, avoiding invasive procedure unless nodule growth is observed. The T_{RO} classifier also classifies the remaining 56.1% of the intended use population as Indeterminate. Subjects having an Indeterminate test result should be treated according to the standard of care.

[0127] It is desirable to further stratify subjects having an Indeterminate test result with the T_{RO} classifier (Classifier 1) according to the subject's risk of bearing a cancerous nodule. The Reflex Lung Classifier (also referred to herein as rule-in classifier; T_{RI}; Classifier 2) was developed for that purpose and is described herein. The Reflex Lung Classifier (rule-in classifier; T_{RI}; Classifier 2) categorizes subjects having high risk of cancer as Likely Cancer and the rest as Indeterminate II. See FIG. 1B.

TABLE 1
Proteins, Transitions and Coefficients of the TRO Classifier (Rule-Out)

| Protein | Transition | Coefficient |
|---|---|---|
| ALDOA | ALQASALK_401.25_617.40 (SEQ ID NO: 65) | −0.47459794 |
| COIA1 | AVGLAGTFR_446.26_721.40 (SEQ ID NO: | −2.468073083 |
| | 69) | |
| TSP1 | GFLLLASLR_495.31-559.40 (SEQ ID NO: 68) | 0.33223188 |
| FRIL | LGGPEAGLGEYLFER_804.40_1083.60 | −0.864887827 |
| | (SEQ ID NO: 66) | |
| LG3BP | VEIFYR_413.73_598.30 (SEQ ID NO: 67) | −0.903170248 |
| COIA1 X FRIL | Interaction | −1.227671396 |
| ALPHA | Constant | −1.621210001 |

[0128] Below is a summary of results for the Xpresys® Lung CR (Cancer Risk) (Combination T_{RO} and T_{RI} Classifier) Retrospective Validation Study. The Xpresys® Lung CR Test contains two integrated classifiers: 1) Xpresys® Lung (Classifier 1; Rule-out Classifier; T_{RO}) which stratifies patients into Likely Benign and Indeterminate I, and 2) Reflex® Lung Classifier (Classifier 2; Rule-in Classifier; T_{RI}) which further stratifies patients having an Indeterminate I test result into Indeterminate II and likely Cancer. See FIG. 1B.

### Study Design for the Xpresys Lung CR (Combination Rule-Out/Rule-in Classifier)

[0129] The study design for the Xpresys Lung CR Classifier (combination T_{RO} and T_{RI}) used previously acquired biological samples described in U.S. Pat. No. 9,201,044 and U.S. Pat. No. 9,297,805, the contents of each of which are incorporated herein by reference in their entireties. The exclusion and exclusion criteria were previously described. See Vachani et al “Validation of a Multi-Protein Plasma Classifier to Identify Benign Lung Nodules,” Journal of Thoracic Oncology: official publication of the International Association for the Study of Lung Cancer, the contents of which are incorporated herein in its entirety by reference. Briefly, all clinical samples were from subjects with lung nodules or 8-30 mm in size and 40 years old or older.

[0130] As shown in FIG. 1A, 141 samples (63 benign and 78 cancer) passed quality assessment. Xpresys® Lung (Rule-out classifier; T_{RO}) classified 54 samples (32 benign and 22 cancer) as Likely Benign, and 87 Samples (31 benign and 56 cancer) as Indeterminate I using the validation threshold of 0.47. Samples classified as Indeterminate by Xpresys® Lung (T_{RO}) were used in this study to determine and validate the Reflex Lung Classifier (Rule-in classifier; Classifier 2; T_{RI}).

[0131] The intended use population of Xpresys® Lung CR (combination T_{RO} and T_{RI} classifier) requires the exclusion from this validation study of patients who were diagnosed within 2 years of sample collection of any cancer other than non-melanoma skin cancer. As a consequence of this, 18 samples (8 benign and 10 cancer) were removed from this study. The remaining 123 samples (55 benign and 68 cancer) were used to validate Xpresys® Lung CR (combination T_{RO} and T_{RI} classifier). See FIG. 1B.

[0132] Xpresys® Lung (T_{RO}) is a component of Xpresys® Lung CR (combination T_{RO} and T_{RI} classifier). Thus, before validating Xpresys® Lung CR, Xpresys® Lung needs to be revalidated on the reduced sample set. The methodology and results are summarized below.

### Revalidation of Xpresys® Lung (Classifier 1; Rule-Out; T_{RO})

[0133] Xpresys® Lung (T_{RO}) validation was carried out using the N_{C}=68 cancer and N_{B}=55 benign samples. We calculated pAUC on 10,000 bootstrap samples using the function “comproc” in R package “pcvsuite”. The mean value of pAUC was 0.047 (FIG. 2). The corresponding one-sided 95% lower confidence limit pAUC_{L} was 0.023, which was greater than pAUC₀=0.02. Thus the null hypothesis H1 of pAUC_{L}<pAUC₀ was rejected. The alternative hypothesis pAUC_{L}≧pAUC₀ was validated.

[0134] The rejection of the null hypothesis H1 allowed us to sequentially test the null hypotheses H_{20.38}, H_{20.39}, etc., that is frac_{T,L}<frac0=0.447 at thresholds T=0.38, 0.39, etc. The testing procedure was carried out as described in DES-0001. First, we fitted the raw ROC curve with the binomial form TNR=Φ(a+b*Φ−1(FNR)) and obtained a=0.461 and b=0.842. As shown in FIG. 2, the binormal form fitted the raw ROC curve very well. Second, we sequentially tested and rejected the null hypothesis H2T of fracT,L<frac0 at thresholds T=0.38, 0.39, . . . , 0.50. At threshold T=0.51, the null hypothesis H20.51 was accepted and the testing procedure was stopped. The results were summarized in Table 24. Thus Xpresys® Lung was revalidated at threshold T=0.50. Samples having an Xpresys® Lung score equal to or less than 0.5 were classified as Likely Benign. Other samples were classified as Indeterminate I.

[0135] Using an estimated cancer prevalence of 23.1% for 8-30 mm nodules, the performance of Xpresys® Lung (T_{RO}) was calculated and summarized in Table 25. Since the lowest score of any sample in a previous study was 0.211 of a benign sample, we could not determine NPV at scores below 0.211. Considering NPV was a monotonic function of score and NPV=0.981 at score 0.22, we simply set NPV=0.981 at scores between 0.00-0.21.

Validation of Xpresys® Lung CR (Combination T_{RO} and T_{RI} Classifier)

### Validation of the Primary Aim

[0136] Using the newly validated threshold of 0.50, Xpresys® Lung (T_{RO}) classified 55 (31 benign and 24 cancer) out of the samples as Likely Benign and 68 samples (24 benign and 44 cancer) as Indeterminate I. Thus the fraction of cancer samples in the Likely Benign group was frac_{LB}=24/55=0.436 (95% CI: 0.303-0.577). Using a score threshold T, Classifier 2 further classified the 68 Indeterminate I samples into Likely Cancer (if the corresponding sample scores of Classifier 2 were equal to or greater than T) or Indeterminate II. The primary aim of this study is to validate that there is a score threshold T of Classifier 2 such that the fraction of cancer samples (fracT) in the Likely Cancer group is significantly higher than frac_{LB}.

[0137] Since there were only 68 Indeterminate I samples, we modified our validation plan to reduce possible small-sample-size artifacts. Instead of using the raw data, we applied the same method as in the validation of Xpresys® Lung (T_{RO}), fitted the raw ROC curve with the binomial form TPR=Φ(a+b*Φ−1(FPR)) and obtained a=0.361 and b=0.806. As shown in FIG. 3, the binormal form fitted the raw ROC curve well.

[0138] Using a fixed-sequence procedure, the primary aim was validated, i.e. the null hypothesis that frac_{T}<frac_{LB} was rejected, for all thresholds between 0-0.96 based on the fitted data. The outcomes are summarized in Table 26.

### Validation of the Secondary Aim

[0139] The fraction of cancer samples in the study was frac_{C}=68/123=0.553 (95% CI: 0.461-0.643). The secondary aim of this study is to validate that there is a score threshold T of Classifier 2 such that the fraction of cancer samples (frac_{T}) in the Likely Cancer group is significantly higher than frac_{C}. The secondary aim requires a stronger performance of Xpresys® Lung CR than the primary aim.

[0140] Using the same method and the same fixed-sequence procedure as in the validation of the primary aim, the secondary aim was validated, i.e. the null hypothesis that frac_{T}<frac_{C} was rejected, for all thresholds between 0.39-0.60 based on the fitted data. The outcomes are summarized in Table 27. The secondary aim could also have been validated for all thresholds between 0.61-0.96 if the fixed-sequence procedure were not enforced.

### Performance of Classifier 2

[0141] Using the newly validated threshold of 0.50, Xpresys® Lung (T_{RO}) classified 51.3% of intended use population as Likely Benign and the remaining 48.7% as Indeterminate I (Table 25). The expected cancer rate, i.e. PPV, of patients with Indeterminate I test results was 30.5%. Using these parameters and the fitted data, the performance of Classifier 2 was evaluated and summarized in Table 28.

### Post-Test Cancer Risk

[0142] Using the validated thresholds of 0.50 for Classifier 1 and 0.39 for Classifier 2 (based on the validation of the secondary aim which requires a stronger performance of Xpresys® Lung CR (combination T_{RO} and T_{RI}) than the primary aim), Xpresys® Lung CR stratified 51.3% of intended use population as Likely Benign, 39.2% as Likely Cancer and the remaining 9.5% as Indeterminate II. The NPV was 84.0% for the Likely Benign group and the PPV was 31.9% for the Likely Cancer group.

[0143] To further assess cancer risk for patients tested as Likely Benign or Likely Cancer, we define post-test cancer risk (CR) as

$$Cancer Risk = \{ \begin{matrix}1 - NPV ( T ) , if Likely Benign \\ PPV ( T ) , if Likely Cancer\end{matrix} \qquad ( 1 )$$

where NPV(T) and PPV(T) are the NPV and PPV values at the corresponding thresholds of Classifier 1 and Classifier 2, respectively: See Tables 25 and 28. We further define Test Population, i.e. the expected percentage of intended use population whose test scores are below (for Likely Benign) or above (for Likely Cancer) the corresponding thresholds, as

$$Test Population = \{ \begin{matrix}LBR ( T ) , if Likely Benign \\ 1 - LCR ( T ) , if Likely Cancer\end{matrix} \qquad ( 2 )$$

where LBR(T) and LCR(T) are the Likely Benign Rate and the Likely Cancer Rate at the corresponding thresholds of Classifier 1 and Classifier 2, respectively: See Tables 25 and 28. In FIG. 4, we plotted Cancer Risk as a function of Test Population to further stratify patients tested as Likely Benign or Likely Cancer.

### Method for Testing Null Hypothesis

[0144] With a specific threshold T of Classifier 2, the null hypothesis of the primary aim states that the fraction of cancer samples (frac_{T}) in the Likely Cancer group is lower than the fraction of cancer samples (frac_{LB}) in the Likely Cancer group, i.e. fracT<fracLB. The following method were used to test the null hypothesis of the primary aim:

[0145] 1. Fit the ROC curve of the study with a binormal form, i.e. TPR=Φ(a+b*Φ−1(FPR)), using R function “rocreg” (16, 17). Here TPR is true positive rate, i.e. sensitivity, FPR is false positive rate, i.e. 1-specificity, and Φ(x) is the normal cumulative distribution function. The fitting of ROC curves with binormal forms is well justified (18).

[0146] 2. Calculate fitted false positives (FP_{T,f}) and fitted true positives (TP_{T,f}) as follows:

a. Get total cancer calls (N_{B,T}+N_{C,T}) from actual data in the study.
b. Solve FPR by matching total cancer calls from actual data and from fitted data: N_{B,T}+N_{C,T}=N_{B}*FPR+NC*Φ(a+b*Φ−1(FPR)).
c. Get FP_{T,f}=NB*FPR.
d. Get TP_{T,f}=NC*Φ(a+b*Φ−1(FPR)).

[0147] 3. Calculate the one-sided, 95% lower confidence limit of fracT,f=TPT,f/(TPT,f+FPT,f), using Jeffreys interval implemented in R function “binom.bayes” in package “binom”:

frac_{T, L}=binom.bayes(TP_{T,f}, TP_{T,f}+FP_{T,f}, conflevel=0.9, type=“central”, tol=1e-12)$lower

[0148] 4. Reject the null hypothesis if frac_{T,L}≧frac_{LB}. Otherwise, accept the null hypothesis. Accept the null hypothesis if the code fails to converge on frac_{T,L}.

[0149] The null hypothesis of the secondary aim states that the fraction of cancer samples (frac_{T}) in the Likely Cancer group is lower than the fraction of cancer samples (frac₀) in the study, i.e. frac_{T}<frac₀. The same method was used to test the null hypothesis of the secondary aim.

### Rule-in Classifier (Classifier 2; Reflex Lung) Development

[0150] The Reflex Lung Classifier (Classifier 2; Reflex Lung; T_{RI}) study process flowchart is shown in FIG. 5. In one embodiment, Classifier 2 is used when the rule-out Classifier 1 gives an Indeterminate I score for a biological sample. See FIG. 1B.

### QC Assessment of LC-MRM-MS Data

[0151] The set of proteins that were analyzed for the rule-in classifier (Classifier 2; T_{RI}) consisted of all the proteins that were reliably and robustly detected and described in U.S. Pat. No. 9,201,044 and U.S. Pat. No. 9,297,805. All of the proteins were vetted in parallel to the initial development. Table 2 below is a list of the proteins that were reliably detectable and reproducibly quantifiable as shown in Li et al. “An integrated quantification method to increase the precision, robustness, and resolution of protein measurement in human plasma samples,” Clinical Proteomics, 2015, 12:3.

TABLE 2
Protein and Corresponding Peptide/Transition

| Protein | Quantification Transition |
|---|---|
| ISLR | ALPGTPVASSQPR_640.85_841.50 |
| | (SEQ ID NO: 77) |
| ALDOA | ALQASALK_401.25_617.40 |
| | (SEQ ID NO: 65) |
| CD14 | ATVNPSAPR_456.80_527.30 |
| | (SEQ ID NO: 78) |
| COIA1 | AVGLAGTFR_446.26_721.40 |
| | (SEQ ID NO: 69) |
| IBP3 | FLNVLSPR_473.28_685.40 |
| | (SEQ ID NO: 79) |
| TSP1 | GFLLLASLR_495.31_559.40 |
| | (SEQ ID NO: 68) |
| FRIL | LGGPEAGLGEYLFER_804.40_1083.60 |
| | (SEQ ID NO: 66) |
| BGH3 | LTLLAPLNSVFK_658.40_804.50 |
| | (SEQ ID NO: 80) |
| ENPL | SGYLLPDTK_497.27_308.10 |
| | (SEQ ID NO: 81) |
| GRP78 | TWNDPSVQQDIK_715.85_288.10 |
| | (SEQ ID NO: 82) |
| LG3BP | VEIFYR_413.73_598.30 |
| | (SEQ ID NO: 67) |
| PTPRJ | VITEPIPVSDLR_669.89_896.50 |
| | (SEQ ID NO: 76) |
| TENX | YEVTVVSVR_526.29_293.10 |
| | (SEQ ID NO: 83) |
| KIT | YVSELHLTR_373.21_428.30 |
| | (SEQ ID NO: 70) |
| GGH | YYIAASYVK_539.28_638.40 |
| | (SEQ ID NO: 84) |
| S10A6 | ELTIGSK_374.22_291.2 |
| | (SEQ ID NO: 85) |

[0152] The following proteins were subsequently rejected from further study: AIFM1, LRP1, PROF1, TETN, and PRDX1.

### Normalization of Values

[0153] The values were normalized according to the methods described in U.S. Ser. No. 14/612,959, the contents of which are incorporated herein by reference in its entirety. Briefly, each protein's abundance is represented by the ratio of its endogenous area to the corresponding SIS heavy transition. Each putative classification response ratio is normalized by the median samples response ratio using normalization proteins (PEDF, MASP1, GELS, LUM, C163A, and PTPRJ). The protein's abundance is then Box-Cox normalized using equation (3) with the lambda parameters listed in Table 3.

$${\tilde{P}}_{i} = \{ \begin{matrix}\frac{{P}^{{λ}_{i}} - 1}{{λ}_{i}} , if {λ}_{i} \neq 0 \\ ln ( {P}_{i} ) , if {λ}_{i} = 0\end{matrix} \qquad ( 3 )$$

TABLE 3
Box Cox lambda parameters

| Protein | Transition | Lambda |
|---|---|---|
| ISLR | ALPGTPVASSQPR_640.85_841.50 | −0.2 |
| | (SEQ ID NO: 77) | |
| ALDOA | ALQASALK_401.25_617.40 | −0.61 |
| | (SEQ ID NO: 65) | |
| CD14 | ATVNPSAPR_456.80_527.30 | −1.03 |
| | (SEQ ID NO: 78) | |
| COIA1 | AVGLAGTFR_446.26_721.40 | −0.23 |
| | (SEQ ID NO: 69) | |
| IBP3 | FLNVLSPR_473.28_685.40 | 0.69 |
| | (SEQ ID NO: 79) | |
| TSP1 | GFLLLASLR_495.31_559.40 | 0.02 |
| | (SEQ ID NO: 68) | |
| FRIL | LGGPEAGLGEYLFER_804.40_1083.60 | 0 |
| | (SEQ ID NO: 66) | |
| BGH3 | LTLLAPLNSVFK_658.40_804.50 | 0.37 |
| | (SEQ ID NO: 80) | |
| ENPL | SGYLLPDTK_497.27_308.10 | 0.10 |
| | (SEQ ID NO: 81) | |
| GRP78 | TWNDPSVQQDIK_715.85_288.10 | −0.18 |
| | (SEQ ID NO: 82) | |
| LG3BP | VEIFYR_413.73_598.30 | −0.63 |
| | (SEQ ID NO: 67) | |
| PTPRJ | VITEPIPVSDLR_669.89_896.50 | 1.04 |
| | (SEQ ID NO: 76) | |
| TENX | YEVTVVSVR_526.29_293.10 | 0.92 |
| | (SEQ ID NO: 83) | |
| KIT | YVSELHLTR_373.21_428.30 | 0.68 |
| | (SEQ ID NO: 70) | |
| GGH | YYIAASYVK_539.28_638.40 | 0.31 |
| | (SEQ ID NO: 84) | |

### Protein Panel Search

[0154] The S10A6 protein was not integrated manually, and, as a result, was not included in the panel search. All panel combinations were formed from the remaining 15 proteins in Table 2 (2̂15−1=32767 panels). For each protein panel, 10,000 Monte Carlo Cross Validation logistic regression models were formed with 80% of the data used for training and 20% held out for testing using Equation (4).

$$score = \frac{1}{1 + {e}^{- W}} \qquad ( 4 )$$

### Where

[0155] W=α+ [symbol] βₙ*\tilde{P}ₙ (5)

[0156] Where [symbol] the set proteins in the 32767 protein combinations. The α and β_n coefficients are the median of the 10,000 coefficients determined using Matlab's glmfit function.

[0157] The status and logistic regression score were calculated and a ranking of test samples were recorded for each model. A ROC curve was computed using the sample status and ranking of these stacked values. From the ROC curve the partial AUC was computed for the False Positive Rate from 0 to 0.2. The panels were ranked by partial AUC the sorted ranking of panels is displayed in FIG. 3.

[0158] Table 4 depicts the frequency of occurrence of proteins in the panel as a function of the number of top ranked panels. The last column 1092 panels is every panel above the randomly expected partial AUC at 0.2 false positive rate (FPR, which equals to 1-sensitivity). The randomly expected partial AUC at the training specificity of 0.8 (FPR−0.2) is equal to the area under the diagonal line of the ROC curve from 0 to 0.2 is (0.2*0.2/2)−0.02.

TABLE 4
Protein frequency in top panels

| Proteins | 25 top panels. | 100 top panels. | 200 top panels. | 1092 top panels. |
|---|---|---|---|---|
| GGH | 25 | 100 | 197 | 1057 |
| ALDOA | 25 | 99 | 196 | 928 |
| TENX | 25 | 97 | 192 | 942 |
| COIA1 | 24 | 93 | 177 | 827 |
| TSP1 | 21 | 77 | 145 | 718 |
| LG3BP | 18 | 76 | 153 | 743 |
| FRIL | 18 | 63 | 123 | 664 |
| GRP78 | 14 | 54 | 107 | 500 |
| IBP3 | 12 | 47 | 88 | 425 |
| ENPL | 10 | 36 | 78 | 548 |
| BGH3 | 3 | 22 | 55 | 355 |
| PTPRJ | 2 | 16 | 46 | 306 |
| ISLR | 1 | 14 | 30 | 266 |
| CD14 | 0 | 13 | 34 | 297 |
| KIT | 0 | 3 | 13 | 196 |

### Analytical Assessment of the Proteins

[0159] The TENX and ENPL was eliminated from further study. Further analysis of the panels containing ENPL contributed to the removal of ENPL from the panels, as ENPL results in a drop in panel performance. See FIG. 4.

### Selected Top Panels

[0160] Panels with partial AUC greater than 0.256 were selected for further analysis. Table 5 provides a list of all the 26 panels meeting the partial AUC performance criteria.

TABLE 5
Top Panels

| Partial | | | | | | | |
|---|---|---|---|---|---|---|---|
| AUC | Proteins | | | | | | |
| 0.0308 | FRIL | LG3BP | GGH | | | | |
| 0.0289 | TSP1 | FRIL | LG3BP | GGH | | | |
| 0.0287 | COIA1 | LG3BP | GGH | | | | |
| 0.0284 | LG3BP | GGH | | | | | |
| 0.0279 | GGH | | | | | | |
| 0.0279 | BGH3 | LG3BP | GGH | | | | |
| 0.0277 | ALDOA | TSP1 | FRIL | KIT | GGH | | |
| 0.0276 | TSP1 | LG3BP | GGH | | | | |
| 0.0275 | ALDOA | TSP1 | FRIL | LG3BP | PTPRJ | GGH | |
| 0.0275 | ALDOA | TSP1 | FRIL | LG3BP | GGH | | |
| 0.0274 | ALDOA | TSP1 | FRIL | LG3BP | KIT | GGH | |
| 0.0269 | ALDOA | IBP3 | TSP1 | FRIL | LG3BP | KIT | GGH |
| 0.0269 | COIA1 | TSP1 | LG3BP | GGH | | | |
| 0.0266 | TSP1 | FRIL | LG3BP | PTPRJ | GGH | | |
| 0.0264 | FRIL | BGH3 | LG3BP | GGH | | | |
| 0.0263 | COIA1 | GGH | | | | | |
| 0.0263 | ALDOA | TSP1 | FRIL | GGH | | | |
| 0.0262 | COIA1 | FRIL | LG3BP | GGH | | | |
| 0.026 | FRIL | LG3BP | PTPRJ | GGH | | | |
| 0.0259 | ALDOA | COIA1 | TSP1 | FRIL | LG3BP | PTPRJ | GGH |
| 0.0258 | ALDOA | IBP3 | TSP1 | FRIL | LG3BP | PTPRJ | GGH |
| 0.0257 | ALDOA | IBP3 | TSP1 | FRIL | KIT | GGH | |
| 0.0257 | ALDOA | COIA1 | TSP1 | FRIL | KIT | GGH | |
| 0.0256 | CD14 | FRIL | LG3BP | GGH | | | |
| 0.0256 | COIA1 | LG3BP | PTPRJ | GGH | | | |
| 0.0256 | COIA1 | BGH3 | LG3BP | GGH | | | |

### Addition of S10A6 to Top Panels

[0161] The performance of the 26 top panels was assessed by partial AUC at 0.2 FPR following the addition of S10A6. The results indicate that none of the panels had better performance following the addition of the S10A6 protein, and, as such, the S10A6 protein was subsequently dropped from further consideration.

### Interaction Term Search

[0162] To each of the top panels an additional interaction term was added one at a time to produce a new panel. The set of linear interaction terms is formed by subtracting the mean clinical sample value from each sample's abundance and multiplying every combination of protein pairings as in Equation 6.

W= [symbol] + [symbol] βₙ*\tilde{P}ₙ+γ_{m,n}*(\tilde{P}_{I}_{ₘ}−P̅_{I}_{ₘ})*(\tilde{P}_{I}_{ₙ}−P̅_{I}_{ₙ}) (6)

[0163] Each of the 26 panels was tested with every relevant interaction term. An interaction term is relevant when the protein pair exists in the panel. Models were trained with the method described in the section above titled, “Protein Panel Search.” When the interaction term was found to improve the models partial AUC it was kept for further analysis. All the interaction protein pairings that improved the panel were used to form a new exhaustive list of panels consisting of the 26 starting panels and every combination of interaction pairings that improved the partial AUC. This resulted in 247 panels.

### Analysis of Panels by Cross Validated PPV and Sensitivity

[0164] The top 30 panels from the interaction term search were re-trained using the same method but tracking all model coefficients. Measuring the CV of each protein's model coefficients allows use to find a set of models that were consistently stable across the 10,000 trials. A set of four panels listed in Table 6 were selected that had no coefficient CV greater than 0.5.

TABLE 6
Stable Proteins

| Model | Proteins | Interactions |
|---|---|---|
| 1 | ALDO, TSP1, FRIL, LG3BP, | ALDO × KIT, ALDO x GGH |
| | KIT, GGH | |
| 2 | ALDO, TSP1, FRIL, KIT, | ALDO × KIT |
| | GGH | |
| 3 | FRIL, LG3BP, GGH | FRIL × LG3BP, LG3BP × GGH |
| 4 | FRIL, LG3BP, GGH | FRIL × LG3BP |

[0165] The performance (PPV, sensitivity) is presented in FIGS. 8-11. These figures split the 10,000 trained models into 25 segments each curve is plotted separately to give an assessment of variability in PPV and Sensitivity. It was determined that it would be desirable to see the performance of the panel as a function of the subset of samples that were classified as indeterminate by the Xpresys® Lung rule-out classifier (T_{RO}).

[0166] The same cross validated PPV/sensitivity analysis was performed except those samples ruled indeterminate using the Xpresys® Lung rule-out classifier (T_{RO}) were excluded from the testing dataset. When restricting the number of samples to those ruled indeterminate (samples having a rule-out threshold greater than 0.47) the prevalence of the cancer rate increases. Using the prevalence data described in US-20130217057 and US-20150031065, rule-out performance: sensitivity=0.695 and specificity=0.480. See FIG. 12.

$${PPV}^{′} = \frac{prevalence * {sensitivity}_{RVA}}{\begin{matrix}( prevalence * {sensitivity}_{RVA} ) + \\ ( 1 - prevalence ) ( 1 - {specificity}_{RVA} )\end{matrix}} \\ {PPV}^{′} = 0.28647009 \qquad ( 7 )$$

[0167] FIGS. 10, 11, 12, and 13 depict the PPV and Sensitivity for Models 1 through 4 along with the performance on the training data. All plots generated with a prevalence of 28.6%.

### Selection of the Best Performing Model

[0168] The cross-validated PPV and sensitivity for Model 4 are poor so the model was dropped from consideration. The best performance is from Model 2.

[0169] The mean estimated cross-validated performance of Model 2 at different Rule-in Rates (RIR's) is displayed in Table 7.

TABLE 7
Estimated Performance of the best panel (Model 2) at various Rule-In Rates

| RIR (%) | Sensitivity (%) | PPV (%) |
|---|---|---|
| 5 | 21.3706 | 70.1529 |
| 6 | 23.8839 | 65.3381 |
| 7 | 26.3401 | 60.6978 |
| 8 | 28.4113 | 57.8368 |
| 9 | 30.4649 | 55.113 |
| 10 | 32.4895 | 52.4401 |
| 11 | 34.4493 | 50.6195 |
| 12 | 36.4303 | 49.1303 |
| 13 | 38.4081 | 47.6504 |
| 14 | 40.3784 | 46.4496 |
| 15 | 42.3759 | 45.5594 |
| 16 | 44.3693 | 44.6844 |
| 17 | 46.367 | 43.8709 |
| 18 | 48.3875 | 43.2731 |
| 19 | 50.423 | 42.7209 |
| 20 | 52.4343 | 42.168 |
| 21 | 54.4031 | 41.6715 |
| 22 | 56.3822 | 41.2319 |
| 23 | 58.3318 | 40.7878 |
| 24 | 60.1832 | 40.3321 |
| 25 | 61.9598 | 39.8741 |
| 25 | 61.9598 | 39.8741 |

### Selection of the Best Performing Model

[0170] The analytical performance was studied with the analytical dataset to determine variability based on different analytical positions for detailed information. See Example titled Analytical Validation for Proposed Reflex Classifiers. For all models the human plasma standard (HPS) calibration procedure resulted in adding additional variability in the results. Accordingly, in one embodiment, it is recommended not to use the HPS calibration process with the Rule-In classifier.

[0171] One protein of concern GGH (Position to Position variability is high 63%, 42%, 80%) protein is in all the panels but the variability didn't translate into greater score variability. The analytical summary data is presented in Table 8.

TABLE 8
Analytical Summary Data

| | HPS | Pos to Pos | | Col to Col | Col to Col |
|---|---|---|---|---|---|
| Model | SD | SD | Pos to Pos | SD | Correlation |
| 1 | 0.041 | 0.074 | 95, 92, 96 | 0.062 | 89, 95, 96 |
| 2 | 0.082 | 0.039 | 97, 99, 98 | 0.040 | 89, 92, 92 |
| 3 | 0.057 | 0.057 | 96, 94, 98 | 0.031 | 92, 85, 96 |

### Conclusion

[0172] Model 2 consisting of 5 proteins ALDOA, TSP1, FRIL, KIT and GGH along with the interaction terms ALDOA×KIT was chosen for validation. See Table 9 for the definition of Model 2.

TABLE 9
Model 2 Proteins, Transitions and Coefficients

| Proteins | Transition | Coefficients |
|---|---|---|
| ALPHA | ALPHA | 5.0263 |
| ALDOA | ALQASALK_401.25_617.40 | −0.5549 |
| | (SEQ ID NO: 65) | |
| TSP1 | GFLLLASLR_495.31_559.40 | 0.3359 |
| | (SEQ ID NO: 68) | |
| FRIL | LGGPEAGLGEYLFER_804.40_ | |
| | 1083.60 | |
| | (SEQ ID NO: 66) | 0.4924 |
| KIT | YVSELHLTR_373.21_428.30 | |
| | (SEQ ID NO: 70) | 2.3120 |
| GGH | YYIAASYVK_539.28_638.40 | 2.0225 |
| | (SEQ ID NO: 84) | |
| ALDOA_ | ALDOA_X_KIT | −5.9381 |
| X_KIT | | |

[0173] The samples score is calculated with the formula (2) where

W=α+β_{ALDOA}*\tilde{P}_{ALDOA}+β_{FRIL}*\tilde{P}_{FRIL}+β_{GGH}*\tilde{P}_{GGH}+β_{KIT}*\tilde{P}_{KIT}+β_{TSP1}*\tilde{P}_{TSP1}+γ*(\tilde{P}_{ALDOA}+0.19189)*(\tilde{P}_{KIT}+0.69956)

### Example 2: Experimental Methods—Laboratory Workflow

[0174] The laboratory workflow is depicted in FIG. 17. In one embodiment, the sample workflow consists of eight phases (i.e. sample collection and shipping, sample receipt and accessioning, sample batching, depletion of plasma proteins, enzymatic digestion of abundant plasma proteins, enzymatic digestion, sample clean-up and addition of internal standards, LC-MRM mass spectrometry, and scoring algorithm and test result).

[0175] The sample collection step includes the collection of a blood sample from a subject, and the subsequent processing of the blood sample to isolate plasma from the blood sample. In one embodiment, the plasma sample is placed in a K2-EDTA Vacutainer, and shipped on dry ice to a processing facility. Upon the arrival of the plasma sample to the processing facility, the plasma sample is inspected to assure quality control standards (i.e. acceptable limit of hemolysis) and placed in storage until further processing.

[0176] For processing, the samples undergo a batching process. The batch refers to a set of test samples, human plasma standards (HPS) and blanks that are tested and go through a laboratory process on the same testing plate. The HPS samples are aliquots of pooled donor plasma samples comprised of pooled plasma from 40 healthy males and 40 healthy females. In one embodiment, four HPS samples and two blank samples are run in a batch. Each batch undergoes quality control to monitor the response from the peptides in every HPS sample, and if the response is outside of acceptable limits then the assay (batch) fails. Likewise, if the negative control (i.e. the blank) has an erroneous reading, the entire batch fails.

[0177] The batches are subsequently depleted of high abundance proteins (HAPs) and medium abundance proteins (MAPs). To accomplish removal of the HAPs and MAPs the samples are processed with an immunodepletion step wherein the samples pass through an immunoaffinity column that contains antibodies against approximately 60 high and medium abundance plasma proteins. Following the depletion step, two fractions of plama proteins remain, a low abundance protein (LAP) plasma sample and a HAP/MAP sample. The LAP fraction contains the proteins that comprise the rule-out and rule-in classifiers. Quality control is performed following immunodepletion (i.e. via comparison of proteins found in depleted HPS, and analysis of the blank controls).

[0178] The immunodepleted sample containing the LAP fraction is subsequently processed by enzymatic digestion. In one embodiment, trypsin is used for enzymatic digestion of the protein. Other proteolytic enzymes may be used, for example, Chymotrypsin, Endoproteinase Asp-N, Endoproteinase Arg-C(mouse submaxillary gland), Endoproteinase Glu-C(V8 protease) (Staphylococcus aureus), Pepsin, Elastase, Papain, Proteinase K, Subtilisin, Clostripain, and others not in this list may be used. Trypsin efficiently and specifically cleaves amide bonds on the C-terminal side of arginine and lysine resulting in a predictable set of peptides for each protein. Other enzymes can be used in this process, including endonucleases. Following enzymatic digestion of the proteins, isotopically labeled internal standards are mixed with the sample. The isotopically labeled standards are peptides having the same sequence as the peptides that comprise the rule-out and rule-in classifiers. The abundance each peptide within the subject's isolated sample is compared to the isotopically labeled peptides for peptide normalization. As such, the isotopically labeled peptides are used for normalizing the amounts of peptides in sample from a subject.

[0179] Following the addition of the internal standards to the sample, the peptides are subsequently separated by HPLC. The separated peptides are then introduced into the mass spectrometer. LC-MRM measures the peptide abundance as peak area. The peptide abundance in a sample is used to calculate a sample score according to a logistic regression algorithm explained in Example 1 and below.

### Example 3: Reflex Lung Classifier (T_{RI}) Scoring

[0180] Blood samples were analyzed as previously described. See U.S. Pat. No. 9,297,805. The Reflex Lung Classifier (T_{RI}) contains two new proteins (KIT and GGH) that are not part of Xpresys® Lung (T_{RO}).

[0181] The Reflex Lung Classifier (T_{RI}) consists of five diagnostics proteins (ALDOA, FRIL, GGH, KIT, and TSP1), six normalization proteins (PEDF, MASP1, GELS, LUM, C163A, and PTPRJ), and one protein-protein interaction term (ALDOA and KIT). The classifier uses a logistic regression model to calculate a score between 0 and 1 from the measured expression of diagnostics proteins. More specifically, the measured expression of each diagnostic protein is first normalized by a panel of the six normalization proteins using the InteQuan method (10). The normalized protein expression Pᵢ is then Box-Cox transformed such that

$${\tilde{P}}_{i} = \{ \begin{matrix}\frac{{P}^{{λ}_{i}} - 1}{{λ}_{i}} , if {λ}_{i} \neq 0 \\ ln ( {P}_{i} ) , if {λ}_{i} = 0\end{matrix} . \qquad ( 3 )$$

[0182] The transformation coefficients {λᵢ} are listed in Table 2. The classifier score is then calculated as

$$score = \frac{1}{1 + {e}^{- W}} \qquad ( 4 )$$

where

W=αβ_{ALDOA}*\tilde{P}_{ALDOA}+β_{FRIL}*\tilde{P}_{FRIL}+β_{GGH}*\tilde{P}_{GGH}+β_{KIT}*\tilde{P}_{KIT}+β_{TSP1}*\tilde{P}_{TSP1}+β*(\tilde{P}_{ALDOA}+0.19189)*(\tilde{P}_{KIT}+0.69956) (5)

All coefficients α₁ {βᵢ} and γ are listed in Table 2. Samples whose Reflex Lung (T_{RI}) score is greater or equal to the validated threshold T of the rule-in classifier (see Example 1) are classified as Likely Cancer.

TABLE 10
Rule-Out (T_{RO}) and Rule-In (T_{RI}) Classifiers
Diagnostic Proteins

| Protein | | Box-Cox | Rule-Out | Rule-In |
|---|---|---|---|---|
| (HUMAN) | Transition | (λ) | (β) | (β) |
| ALDOA | ALQASALK_401.25_617.40 (SEQ ID | −0.61 | −0.4746 | −0.5549 |
| | NO: 65) | | | |
| COIA1 | AVGLAGTFR_446.26_721.40 (SEQ ID | −0.23 | −2.4681 | |
| | NO: 69) | | | |
| FRIL | LGGPEAGLGEYLFER_804.40_1083.60 | 0 | −0.8649 | 0.4924 |
| | (SEQ ID NO: 66) | | | |
| GGH | YYIAASYVK_539.28_638.40 (SEQ ID | 0.31 | | 2.0225 |
| | NO: 84) | | | |
| KIT | YVSELHLTR_373.21_428.30 (SEQ ID | 0.68 | | 2.3120 |
| | NO: 70) | | | |
| LG3BP | VEIFYR_413.73_598.30 (SEQ ID NO: | −0.63 | −0.9032 | |
| | 67) | | | |
| TSP1 | GFLLLASLR_495.31_559.40 (SEQ ID | 0.02 | 0.3322 | 0.3359 |
| | NO: 68) | | | |
| Interaction (γ) | COIA1 and FRIL | | −1.2277 | |
| Interaction (γ) | ALDOA and KIT | | | −5.9381 |
| Constant (α) | | | −1.6212 | 5.0263 |

Normalization Proteins

| Protein | |
|---|---|
| (HUMAN) | Transition |
| PEDF | LQSLFDSPDFSK_692.34_593.30 (SEQ |
| | ID NO: 71) |
| MASP1 | TGVITSPDFPNPYPK_816.92_258.10 |
| | (SEQ ID NO: 72) |
| GELS | TASDFITK_441.73_710.40 (SEQ ID NO: |
| | 73) |
| LUM | SLEDLQLTHNK_433.23_499.30 (SEQ |
| | ID NO: 74) |
| C163A | INPASLDK_429.24_630.30 (SEQ ID NO: |
| | 75) |
| PTPRJ | VITEPIPVSDLR_669.89_896.50 (SEQ |
| | ID NO: 76) |

### Validation Procedure

[0183] Since 32 benign and 22 cancer samples were classified as Likely Benign by Xpresys® Lung (T_{RO}), the fraction of cancer samples in the Likely Benign group is frac_{LB}=22/54=0.407 (95% CI: 0.276-0.550). Now assume that N_{C,T} cancer and N_{B,T} benign samples are in the Likely Cancer group at the threshold T. Then the corresponding fraction of cancer samples is defined as frac_{T}=NC,T/(NB,T+NC,T). The null hypothesis for the primary aim under threshold T (H_{T}) is defined as: frac_{T}<frac_{LB}. The null hypothesis H_{T} is rejected if the one-sided, lower 95% (α=0.05) confidence bound (fracT, L) of frac_{T} is no less than frac_{LB}, i.e. frac_{T, L}≧frac_{LB}. The exact (Clopper-Pearson) method will be used to calculate frac_{T, L} based on binomial distribution. (see Clopper, C. J. & Pearson, E. S. (1934). “The use of confidence or fiducial limits illustrated in the case of the binomial.” Biometrika, 26, 404-413).

[0184] A fixed-sequence procedure is used to control the overall testing error in the study. (see A. Dmitrienko, R. B. D'Agostino, Sr., and M. F. Huque, ‘Key Multiplicity Issues in Clinical Drug Development’, Stat Med, 32 (2013), 1079-111.; A. Dmitrienko, A. C. Tamhane, and F. Bretz, Multiple Testing Problems in Pharmaceutical Statistics, Chapman & Hall/Crc Biostatistics Series (Boca Raton, Fla.: Chapman & Hall/CRC, 2010). The following thresholds will be tested for the primary aim: T=0.60, 0.59, . . . , 0, 0.61, 0.62, . . . , 1.00. Basically the threshold sequence contains two subsequences: The first subsequence decreases from 0.6 to 0 by an increment of 0.01 and the second one increases from 0.61 to 1.00 by an increment of 0.01. The first threshold 0.60 is chosen since the corresponding positive predictive value (PPV) is predicted to be twice the pretest cancer prevalence of 23.1%, based on the cross validated performance in the discovery study (4). Hypotheses will be tested in the following order: H0.60->H0.59-> . . . ->H0->H0.61->H0.62-> . . . ->H1.00. More specifically, H0.60 will be tested first. If H0.60 is rejected, H0.59 will be tested next. If H0.59 is rejected, H0.58 will be tested next. So on and so forth. During this sequencing of testing, if any hypothesis is accepted, the testing procedure stops immediately at the accepted hypothesis and subsequent hypotheses will not be tested at all.

### Example 4: Analytical Validation for Proposed Reflex Classifiers (T_{RI})

[0185] The four protein model parameters are described in Tables 11-14 below.

TABLE 11
Model 1 Definition

| Proteins | Transition | Coefficients | Coefficients CV |
|---|---|---|---|
| ALPHA | ALPHA | 6.6948 | 0.2529 |
| ALDOA | ALQASALK_401.25_617.40 (SEQ ID | −0.6076 | 0.4496 |
| | NO: 65) | | |
| TSP1 | GFLLLASLR_495.31_559.40 (SEQ ID | 0.3595 | 0.4673 |
| | NO: 68) | | |
| FRIL | LGGPEAGLGEYLFER_804.40_1083.60 | 0.4975 | 0.3129 |
| | (SEQ ID NO: 66) | | |
| LG3BP | VEIFYR_413.73_598.30 (SEQ ID NO: | −0.9924 | 0.3720 |
| | 67) | | |
| KIT | YVSELHLTR_373.21_428.30 (SEQ ID | 2.7082 | 0.4068 |
| | NO: 70) | | |
| GGH | YYIAASYVK_539.28_638.40 (SEQ ID | 3.0481 | 0.3051 |
| | NO: 84) | | |
| ALDOA_X_KIT | ALDOA_X_KIT | −8.2276 | 0.2579 |
| ALDOA_X_GGH | ALDOA_X_GGH | −5.2163 | 0.3320 |

TABLE 12
Model 2 (Selected Rule-in Model) Definition

| Proteins | Transition | Coefficients | Coefficients CV |
|---|---|---|---|
| ALPHA | ALPHA | 5.0263 | 0.2681 |
| ALDOA | ALQASALK_401.25_617.40 (SEQ ID | −0.5549 | 0.3755 |
| | NO: 65) | | |
| TSP1 | GFLLLASLR_495.31_559.40 (SEQ ID | 0.3359 | 0.4386 |
| | NO: 68) | | |
| FRIL | LGGPEAGLGEYLFER_804.40_1083.60 | 0.4924 | 0.2869 |
| | (SEQ ID NO: 66) | | |
| KIT | YVSELHLTR_373.21_428.30 (SEQ ID | 2.3120 | 0.4089 |
| | NO: 70) | | |
| GGH | YYIAASYVK_539.28_638.40 (SEQ ID | 2.0225 | 0.3892 |
| | NO: 84) | | |
| ALDOA_X_KIT | ALDOA_X_KIT | −5.9381 | 0.3054 |

TABLE 13
Model 3 Definition

| Proteins | Transition | Coefficients | Coefficients CV |
|---|---|---|---|
| ALPHA | ALPHA | 4.1774 | 0.2662 |
| FRIL | LGGPEAGLGEYLFER_804.40_ 1083.60 | 0.3956 | 0.3656 |
| | (SEQ ID NO: 66) | | |
| LG3BP | VEIFYR_413.73_598.30 (SEQ ID NO: | −1.2111 | 0.2714 |
| | 67) | | |
| GGH | YYIAASYVK_539.28_638.40 (SEQ ID | 2.5508 | 0.3272 |
| | NO: 84) | | |
| FRIL_X_LG3BP | FRIL_X_LG3BP | −0.7165 | 0.4399 |
| LG3BP_X_GGH | LG3BP_X_GGH | −4.9609 | 0.4468 |

TABLE 14
Model 4 Definition

| Proteins | Transition | Coefficients | Coefficients CV |
|---|---|---|---|
| ALPHA | ALPHA | 3.6422 | 0.2632 |
| FRIL | LGGPEAGLGEYLFER_804.40_1083.60 | 0.3701 | 0.3932 |
| | (SEQ ID NO: 66) | | |
| LG3BP | VEIFYR_413.73_598.30 (SEQ ID NO: | −1.1070 | 0.2912 |
| | 67) | | |
| GGH | YYIAASYVK_539.28_638.40 (SEQ ID | 2.2146 | 0.3280 |
| | NO: 84) | | |
| FRIL_X_LG3BP | FRIL_X_LG3BP | −0.7781 | 0.4332 |

### Analytical Validation Procedure

[0186] Table 15 summarizes the experimental layout for the analytical validation procedure. Each of the four protein classifier Models (see Table 6) were assayed for analytical performance.

[0187] Table 15: Experimental Layout for the Validation Procedure

[0188] In Table 15, cancer samples are labeled with prefix “C”, and benign samples with prefix “B”. MRM MS data were collected on samples in Batch 2 using two different instruments; the replicate data was labeled as Batch 4. The first HPS aliquot and the aliquots of B7, B2 and C8 in Batch 1 were removed from analysis (shaded).

### Note: The Following are in BOLD Font and Underlined

| | |
|---|---|
| 1. | SD of score >= 0.05 |
| 2. | CV of or protein > 20% |
| 3. | Correlation < 0.9 |
| 4. | F-test p-value >= 0.05 |

### Results Based on 15 HPS

[0190] Fifteen repeated measurements were successfully obtained from the 12 aliquots of the HPS sample (column 2 was replicated and one HPS was removed), which provided a dataset to assess the overall variations within the study. The obtained SDs, their 95% CIs and the corresponding CVs are listed in Table 16.

TABLE 16
The SDs, their 95% CIs and the corresponding CVs of the four
models obtained from 12 HPS samples with 15 measurements.

| | | | | | Median |
|---|---|---|---|---|---|
| | | Mean | SD | 95% CI of SD | CV |
| Uncalibrated | Model 1 | 2.6348 | 0.6019 | (0.4407, 0.9493) | 0.2284 |
| Wscore | Model 2 | 1.3146 | 0.4756 | (0.3482, 0.7501) | 0.3618 |
| | Model 3 | 0.1765 | 0.2292 | (0.1678, 0.3615) | 1.2989 |
| | Model 4 | 0.0714 | 0.1573 | (0.1151, 0.2480) | 2.2028 |
| Calibrated | Model 1 | 0.7538 | 0.4292 | (0.3142, 0.6768) | 0.5694 |
| Wscore | Model 2 | 0.6559 | 0.3440 | (0.2518, 0.5425) | 0.5244 |
| | Model 3 | 0.6121 | 0.2174 | (0.1592, 0.3428) | 0.3552 |
| | Model 4 | 0.6293 | 0.1485 | (0.1087, 0.2342) | 0.2360 |
| Uncalibrated | Model 1 | 0.9239 | 0.0408 | (0.0299, 0.0643) | 0.0441 |
| score | Model 2 | 0.7784 | 0.0815 | (0.0597, 0.1286) | 0.1047 |
| | Model 3 | 0.5435 | 0.0565 | (0.0413, 0.0890) | 0.1039 |
| | Model 4 | 0.5177 | 0.0391 | (0.0286, 0.0617) | 0.0755 |
| Calibrated | Model 1 | 0.6733 | 0.0889 | (0.0651, 0.1402) | 0.1320 |
| score | Model 2 | 0.6548 | 0.0760 | (0.0556, 0.1198) | 0.1160 |
| | Model 3 | 0.6470 | 0.0497 | (0.0364, 0.0783) | 0.0768 |
| | Model 4 | 0.6516 | 0.0334 | (0.0245, 0.0527) | 0.0513 |
| Protein | ALDOA | 0.4652 | 0.0496 | (0.0363, 0.0781) | 0.1065 |
| | TSP1 | 0.2624 | 0.0588 | (0.0431, 0.0927) | 0.2241 |
| | FRIL | 0.0410 | 0.0041 | (0.0030, 0.0065) | 0.1003 |
| | LG3BP | 1.1942 | 0.1356 | (0.0992, 0.2138) | 0.1135 |
| | KIT | 0.5418 | 0.0468 | (0.0343, 0.0739) | 0.0865 |
| | GGH | 0.3035 | 0.0265 | (0.0194, 0.0417) | 0.0872 |

### Results of Position-to-Position Variation

[0191] Three repeated measurements were successfully obtained from eight out of the nine samples (minus sample B2) that were designated for assessing position-to-position variations. The obtained SDs, their 95% CIs and the corresponding CVs are listed in Table 17. The obtained Pearson correlation coefficients between measurements at different positions are listed in Table 18.

TABLE 17
The SDs, their 95% CIs and the corresponding CVs of the four
models obtained from eight subjects when the corresponding
samples were depleted at three different positions.

| | | | | | Median |
|---|---|---|---|---|---|
| | | Mean | SD | 95% CI of SD | CV |
| Uncalibrated | Model 1 | 0.5842 | 0.4183 | (0.3116, 0.6367) | 0.1054 |
| Wscore | Model 2 | 0.4557 | 0.2314 | (0.1723, 0.3522) | 0.1293 |
| | Model 3 | 0.4066 | 0.3113 | (0.2318, 0.4737) | −0.0976 |
| | Model 4 | 0.2604 | 0.2292 | (0.1707, 0.3488) | −0.0018 |
| Calibrated | Model 1 | −1.0962 | 0.4183 | (0.3116, 0.6367) | −0.0906 |
| Wscore | Model 2 | −0.0411 | 0.2314 | (0.1723, 0.3522) | 0.1900 |
| | Model 3 | 0.7767 | 0.3113 | (0.2318, 0.4737) | 0.1235 |
| | Model 4 | 0.7865 | 0.2292 | (0.1707, 0.3488) | 0.0737 |
| Uncalibrated | Model 1 | 0.6182 | 0.0740 | (0.0551, 0.1126) | 0.0927 |
| score | Model 2 | 0.5839 | 0.0394 | (0.0293, 0.0600) | 0.0691 |
| | Model 3 | 0.5376 | 0.0565 | (0.0421, 0.0861) | 0.0804 |
| | Model 4 | 0.5322 | 0.0432 | (0.0322, 0.0657) | 0.0765 |
| Calibrated | Model 1 | 0.3517 | 0.0752 | (0.0560, 0.1144) | 0.1570 |
| score | Model 2 | 0.5066 | 0.0429 | (0.0320, 0.0653) | 0.0897 |
| | Model 3 | 0.6023 | 0.0559 | (0.0416, 0.0851) | 0.0690 |
| | Model 4 | 0.6251 | 0.0444 | (0.0331, 0.0676) | 0.0607 |
| Protein | ALDOA | 0.7552 | 0.1038 | (0.0773, 0.1580) | 0.1125 |
| | TSP1 | 0.6288 | 0.1077 | (0.0802, 0.1639) | 0.1370 |
| | FRIL | 0.2427 | 0.0124 | (0.0092, 0.0189) | 0.0379 |
| | LG3BP | 1.3681 | 0.1321 | (0.0984, 0.2011) | 0.0639 |
| | KIT | 0.4499 | 0.0162 | (0.0121, 0.0246) | 0.0361 |
| | GGH | 0.2080 | 0.0270 | (0.0201, 0.0411) | 0.1067 |

TABLE 18
Pearson correlation coefficients between measurements on samples
that were depleted at three different positions. The corresponding
95% CIs are listed below the coefficients.

| | | |
|---|---|---|
| Position A vs B | Position A vs C | Position B vs C |

Uncalibrated Wscore

| | | | |
|---|---|---|---|
| Model 1 | 0.936 (0.682, 0.989) | 0.919 (0.609, 0.985) | 0.968 (0.827, 0.994) |
| Model 2 | 0.962 (0.797, 0.993) | 0.990 (0.943, 0.998) | 0.979 (0.883, 0.996) |
| Model2′ | 0.940 (0.698, 0.989) | 0.967 (0.821, 0.994) | 0.979 (0.887, 0.996) |
| Model 3 | 0.958 (0.781, 0.993) | 0.967 (0.822, 0.994) | 0.967 (0.822, 0.994) |
| Model 4 | 0.976 (0.868, 0.996) | 0.972 (0.846, 0.995) | 0.988 (0.934, 0.998) |

Calibrated Wscore

| | | | |
|---|---|---|---|
| Model 1 | 0.945 (0.721, 0.990) | 0.927 (0.641, 0.987) | 0.968 (0.826, 0.994) |
| Model 2 | 0.961 (0.793, 0.993) | 0.989 (0.936, 0.998) | 0.982 (0.899, 0.997) |
| Model 3 | 0.959 (0.785, 0.993) | 0.967 (0.823, 0.994) | 0.968 (0.826, 0.994) |
| Model 4 | 0.975 (0.866, 0.996) | 0.971 (0.845, 0.995) | 0.988 (0.933, 0.998) |

Uncalibrated score

| | | | |
|---|---|---|---|
| Model 1 | 0.953 (0.754, 0.992) | 0.917 (0.599, 0.985) | 0.957 (0.775, 0.992) |
| Model 2 | 0.969 (0.833, 0.995) | 0.989 (0.938, 0.998) | 0.981 (0.894, 0.997) |
| Model 3 | 0.960 (0.790, 0.993) | 0.943 (0.709, 0.990) | 0.982 (0.899, 0.997) |
| Model 4 | 0.981 (0.896, 0.997) | 0.967 (0.824, 0.994) | 0.989 (0.936, 0.998) |

Calibrated score

| | | | |
|---|---|---|---|
| Model 1 | 0.881 (0.464, 0.978) | 0.852 (0.368, 0.973) | 0.962 (0.797, 0.993) |
| Model 2 | 0.968 (0.828, 0.994) | 0.989 (0.941, 0.998) | 0.978 (0.881, 0.996) |
| Model 3 | 0.955 (0.764, 0.992) | 0.930 (0.655, 0.988) | 0.979 (0.887, 0.996) |
| Model 4 | 0.978 (0.882, 0.996) | 0.958 (0.781, 0.993) | 0.986 (0.924, 0.998) |

Protein

| | | | |
|---|---|---|---|
| ALDOA | 0.981 (0.895, 0.997) | 0.991 (0.991, 0.999) | 0.991 (0.951, 0.999) |
| TSP1 | 0.927 (0.640, 0.987) | 0.916 (0.916, 0.985) | 0.995 (0.973, 0.999) |
| FRIL | 0.997 (0.985, 1.000) | 0.999 (0.999, 1.000) | 0.999 (0.992, 1.000) |
| LG3BP | 0.995 (0.970, 0.999) | 0.999 (0.999, 1.000) | 0.993 (0.960, 0.999) |
| KIT | 0.991 (0.949, 0.998) | 0.984 (0.984, 0.997) | 0.995 (0.972, 0.999) |
| GGH | 0.631 (−0.132, 0.925) | 0.423 (0.423, 0.869) | 0.794 (0.202, 0.961) |

### Results of Column-to-Column Variation

[0192] Three repeated measurements were successfully obtained from seven of the nine samples (minus samples B7 and C8) that were designated for assessing column-to-column variations. The obtained SDs, their 95% CIs and the corresponding CVs are listed in Table 19. The obtained Pearson correlation coefficients between measurements using different depletion columns are listed in Table 20.

TABLE 19
The SDs, their 95% CIs and the corresponding CVs of the
four models obtained from seven subjects when the corresponding
samples were depleted by three different columns.

| | | | | | Median |
|---|---|---|---|---|---|
| | | Mean | SD | 95% CI of SD | CV |
| Uncalibrated | Model 1 | −0.6471 | 0.3014 | (0.2207, 0.4754) | −0.0518 |
| Wscore | Model 2 | 0.2529 | 0.2102 | (0.1539, 0.3315) | 0.2015 |
| | Model 3 | −0.4802 | 0.1314 | (0.0962, 0.2072) | −0.4415 |
| | Model 4 | −0.3055 | 0.1971 | (0.1443, 0.3108) | −0.0628 |
| Calibrated | Model 1 | −2.2680 | 0.5324 | (0.3898, 0.8397) | −0.2186 |
| Wscore | Model 2 | −0.1932 | 0.4811 | (0.3522, 0.7587) | −0.4305 |
| | Model 3 | −0.1010 | 0.1630 | (0.1194, 0.2571) | −0.1521 |
| | Model 4 | 0.2218 | 0.1959 | (0.1434, 0.3090) | 0.1409 |
| Uncalibrated | Model 1 | 0.4249 | 0.0621 | (0.0455, 0.0979) | 0.0868 |
| score | Model 2 | 0.5572 | 0.0471 | (0.0345, 0.0743) | 0.0585 |
| | Model 3 | 0.3893 | 0.0309 | (0.0226, 0.0488) | 0.0678 |
| | Model 4 | 0.4332 | 0.0454 | (0.0332, 0.0715) | 0.0700 |
| Calibrated | Model 1 | 0.1705 | 0.0757 | (0.0554, 0.1194) | 0.4214 |
| score | Model 2 | 0.4574 | 0.1050 | (0.0768, 0.1655) | 0.2551 |
| | Model 3 | 0.4779 | 0.0390 | (0.0285, 0.0615) | 0.0672 |
| | Model 4 | 0.5542 | 0.0461 | (0.0337, 0.0726) | 0.0690 |
| Protein | ALDOA | 0.9295 | 0.0820 | (0.0600, 0.1293) | 0.0538 |
| | TSP1 | 0.9030 | 0.1280 | (0.0937, 0.2019) | 0.0873 |
| | FRIL | 0.1299 | 0.0144 | (0.0105, 0.0227) | 0.0530 |
| | LG3BP | 2.1939 | 0.1336 | (0.0978, 0.2106) | 0.0455 |
| | KIT | 0.4225 | 0.0301 | (0.0221, 0.0475) | 0.0664 |
| | GGH | 0.2487 | 0.0323 | (0.0237, 0.0510) | 0.0865 |

TABLE 20
Pearson correlation coefficients between measurements on
samples that were depleted by three different columns. The
corresponding 95% CIs are listed below the coefficients.

| | | |
|---|---|---|
| Column 1 vs 2 | Column 1 vs 3 | Column 2 vs 3 |

Uncalibrated Wscore

| | | | |
|---|---|---|---|
| Model 1 | 0.962 (0.759, 0.995) | 0.985 (0.896, 0.998) | 0.978 (0.852, 0.997) |
| Model 2 | 0.885 (0.395, 0.983) | 0.934 (0.611, 0.990) | 0.905 (0.476, 0.986) |
| Model 3 | 0.931 (0.594, 0.990) | 0.875 (0.359, 0.981) | 0.968 (0.795, 0.995) |
| Model 4 | 0.898 (0.446, 0.985) | 0.968 (0.791, 0.995) | 0.898 (0.447, 0.985) |

Calibrated Wscore

| | | | |
|---|---|---|---|
| Model 1 | 0.962 (0.759, 0.995) | 0.985 (0.896, 0.998) | 0.978 (0.852, 0.997) |
| Model 2 | 0.885 (0.395, 0.983) | 0.934 (0.611, 0.990) | 0.905 (0.476, 0.986) |
| Model 3 | 0.931 (0.594, 0.990) | 0.875 (0.359, 0.981) | 0.968 (0.795, 0.995) |
| Model 4 | 0.898 (0.446, 0.985) | 0.968 (0.791, 0.995) | 0.898 (0.447, 0.985) |

Uncalibrated score

| | | | |
|---|---|---|---|
| Model 1 | 0.898 (0.447, 0.985) | 0.952 (0.702, 0.993) | 0.955 (0.720, 0.994) |
| Model 2 | 0.890 (0.414, 0.984) | 0.924 (0.564, 0.989) | 0.920 (0.542, 0.988) |
| Model 3 | 0.923 (0.556, 0.989) | 0.851 (0.273, 0.978) | 0.958 (0.734, 0.994) |
| Model 4 | 0.897 (0.443, 0.985) | 0.965 (0.773, 0.995) | 0.883 (0.388, 0.983) |

Calibrated score

| | | | |
|---|---|---|---|
| Model 1 | 0.870 (0.338, 0.981) | 0.959 (0.739, 0.994) | 0.944 (0.660, 0.992) |
| Model 2 | 0.889 (0.412, 0.984) | 0.924 (0.562, 0.989) | 0.923 (0.558, 0.989) |
| Model 3 | 0.927 (0.578, 0.989) | 0.867 (0.328, 0.980) | 0.965 (0.773, 0.995) |
| Model 4 | 0.899 (0.450, 0.985) | 0.966 (0.783, 0.995) | 0.905 (0.476, 0.986) |

Protein

| | | | |
|---|---|---|---|
| ALDOA | 0.989 (0.924, 0.998) | 0.996 (0.971, 0.999) | 0.996 (0.974, 0.999) |
| TSP1 | 0.976 (0.842, 0.997) | 0.991 (0.937, 0.999) | 0.995 (0.962, 0.999) |
| FRIL | 0.998 (0.983, 1.000) | 0.960 (0.745, 0.994) | 0.974 (0.827, 0.996) |
| LG3BP | 0.988 (0.915, 0.998) | 0.997 (0.977, 1.000) | 0.988 (0.918, 0.998) |
| KIT | 0.962 (0.756, 0.994) | 0.943 (0.656, 0.992) | 0.948 (0.680, 0.992) |
| GGH | 0.923 (0.559, 0.989) | 0.962 (0.759, 0.995) | 0.920 (0.543, 0.988) |

### Results of Instrument-to-Instrument Variation

[0193] Two repeated measurements were successfully obtained from all samples in Batch 2 that were designated for assessing instrument-to-instrument variations. The replicate was labeled as Batch 4. Three samples (B3, C2 and C3) were depleted at three different positions within the column, which led to three repeated measurements on these samples. Considering that position-to-position variations were rather small, we used the corresponding average values from the three repeated measurements on these samples when evaluating the “pooled” SD and the CV. For the same reason, weighted Pearson correlation coefficients were evaluated to assess the repeatability. The obtained SDs, their 95% CIs and the corresponding CVs are listed in Table 21. The obtained Pearson correlation coefficients between measurements using different instruments are listed in Table 22.

TABLE 21
The SDs, their 95% CIs and the corresponding CVs of the
four models obtained from 12 independent samples when
measuring Batch 2 using two different instruments.

| | | | | | Median |
|---|---|---|---|---|---|
| | | Mean | SD | 95% CI of SD | CV |
| Uncalibrated | Model 1 | 0.1825 | 0.7131 | (0.5114, 1.1772) | −0.0055 |
| Wscore | Model 2 | 0.4975 | 0.4457 | (0.3196, 0.7357) | 0.1247 |
| | Model 3 | 0.1058 | 0.2288 | (0.1641, 0.3777) | −0.1246 |
| | Model 4 | 0.0198 | 0.1762 | (0.1263, 0.2908) | 0.0129 |
| Calibrated | Model 1 | −2.0666 | 0.6512 | (0.4669, 1.0749) | −0.1134 |
| Wscore | Model 2 | −0.5085 | 0.4101 | (0.2941, 0.6770) | −0.0239 |
| | Model 3 | 0.6044 | 0.3016 | (0.2163, 0.4979) | 0.1249 |
| | Model 4 | 0.6239 | 0.2116 | (0.1517, 0.3493) | 0.1386 |
| Uncalibrated | Model 1 | 0.5065 | 0.1230 | (0.0882, 0.2031) | 0.1377 |
| score | Model 2 | 0.5887 | 0.0855 | (0.0613, 0.1412) | 0.0777 |
| | Model 3 | 0.4812 | 0.0467 | (0.0335, 0.0770) | 0.0789 |
| | Model 4 | 0.4886 | 0.0406 | (0.0291, 0.0670) | 0.0784 |
| Calibrated | Model 1 | 0.2267 | 0.0938 | (0.0673, 0.1548) | 0.3969 |
| score | Model 2 | 0.3985 | 0.0911 | (0.0653, 0.1504) | 0.0592 |
| | Model 3 | 0.5795 | 0.0651 | (0.0467, 0.1074) | 0.0788 |
| | Model 4 | 0.6097 | 0.0470 | (0.0337, 0.0776) | 0.0619 |
| Protein | ALDOA | 0.8978 | 0.0925 | (0.0663, 0.1526) | 0.0340 |
| | TSP1 | 0.8260 | 0.0653 | (0.0468, 0.1078) | 0.0564 |
| | FRIL | 0.1842 | 0.0189 | (0.0136, 0.0313) | 0.0917 |
| | LG3BP | 1.8801 | 0.2335 | (0.1674, 0.3854) | 0.0657 |
| | KIT | 0.4805 | 0.0547 | (0.0392, 0.0902) | 0.0678 |
| | GGH | 0.2489 | 0.0309 | (0.0221, 0.0510) | 0.0856 |

TABLE 22
Weighted Pearson correlation coefficients
between measurements made by two different instruments
on 12 independent samples and the corresponding 95% CIs.

| Uncalibrated | Correlation | | 95% CI |
|---|---|---|---|
| Wscore | Model 1 | 0.943 | (0.806, 0.984) |
| | Model 2 | 0.946 | (0.815, 0.985) |
| | Model 3 | 0.962 | (0.867, 0.990) |
| | Model 4 | 0.982 | (0.935, 0.995) |
| Calibrated Wscore | Model 1 | 0.943 | (0.806, 0.984) |
| | Model 2 | 0.946 | (0.815, 0.985) |
| | Model 3 | 0.962 | (0.867, 0.990) |
| | Model 4 | 0.982 | (0.935, 0.995) |
| Uncalibrated score | Model 1 | 0.917 | (0.724, 0.977) |
| | Model 2 | 0.937 | (0.786, 0.983) |
| | Model 3 | 0.940 | (0.795, 0.983) |
| | Model 4 | 0.974 | (0.906, 0.993) |
| Calibrated score | Model 1 | 0.933 | (0.772, 0.981) |
| | Model 2 | 0.929 | (0.760, 0.980) |
| | Model 3 | 0.904 | (0.687, 0.973) |
| | Model 4 | 0.970 | (0.893, 0.992) |
| Protein | ALDOA | 0.989 | (0.960, 0.997) |
| | TSP1 | 0.989 | (0.962, 0.997) |
| | FRIL | 0.985 | (0.947, 0.996) |
| | LG3BP | 0.983 | (0.937, 0.995) |
| | KIT | 0.963 | (0.871, 0.990) |
| | GGH | 0.919 | (0.730, 0.977) |

Note:
the average measurements were used for the three subjects whose samples were depleted three times

TABLE 23
The F-test results of the four models, comparing the variances due to differences between
subjects with the variances due to different depletion positions, column or instrument.

| | | Position-to-Position | | Column-to-Column | | MS-to-MS | |
|---|---|---|---|---|---|---|---|
| | | F | p-value | F | p-value | F | p-value |
| Uncalibrated | Model 1 | 105.693 | 0.009 | 3018.097 | 0.000 | 11.327 | 0.228 |
| Wscore | Model 2 | 124.717 | 0.008 | 442.426 | 0.002 | 8.206 | 0.266 |
| | Model 3 | 9542.436 | 0.000 | 192.744 | 0.005 | 180.468 | 0.058 |
| | Model 4 | 176.052 | 0.006 | 18.186 | 0.053 | 27.662 | 0.147 |
| Calibrated | Model 1 | 119.217 | 0.008 | 7.973 | 0.116 | 1028.510 | 0.024 |
| Wscore | Model 2 | 136.778 | 0.007 | 1.128 | 0.540 | 914.240 | 0.026 |
| | Model 3 | 9648.646 | 0.000 | 10.582 | 0.089 | 9.304 | 0.251 |
| | Model 4 | 173.478 | 0.006 | 19.149 | 0.050 | 10.528 | 0.236 |
| Uncalibrated | Model 1 | 149.064 | 0.007 | 704.863 | 0.001 | 10.893 | 0.232 |
| score | Model 2 | 175.684 | 0.006 | 1129.142 | 0.001 | 12.513 | 0.217 |
| | Model 3 | 1831.765 | 0.001 | 202.848 | 0.005 | 136.270 | 0.067 |
| | Model 4 | 248.966 | 0.004 | 17.196 | 0.056 | 26.136 | 0.152 |
| Calibrated | Model 1 | 106.240 | 0.009 | 3.404 | 0.244 | 22455.463 | 0.005 |
| score | Model 2 | 139.690 | 0.007 | 1.191 | 0.523 | 698.463 | 0.030 |
| | Model 3 | 6004.032 | 0.000 | 10.680 | 0.088 | 5.270 | 0.328 |
| | Model 4 | 152.763 | 0.007 | 19.239 | 0.050 | 7.697 | 0.275 |
| Protein | ALDOA | 18.677 | 0.052 | 34.327 | 0.029 | 41.180 | 0.121 |
| | | 2010039.60 | | | | | |
| | TSP1 | 0 | 0.000 | 19.816 | 0.049 | 66.637 | 0.095 |
| | FRIL | 537.373 | 0.002 | 207.987 | 0.005 | 75.322 | 0.090 |
| | LG3BP | 214.386 | 0.005 | 109.830 | 0.009 | 38.772 | 0.125 |
| | KIT | 184.187 | 0.005 | 2168.736 | 0.000 | 4.008 | 0.373 |
| | GGH | 5.875 | 0.153 | 48.107 | 0.021 | 19.661 | 0.174 |

Note:
For the MS-to-MS, the average measurements were used for the three subjects whose samples were depleted three times.

TABLE 24
Outcomes of testing the null hypotheses H2_{T} at individual thresholds
for Xpresys ® Lung Classifier (T_{RO}).

| Threshold | TN_{T,f} | FN_{T,f} | frac_{T,f} | frac_{T, L} | Null hypothesis |
|---|---|---|---|---|---|
| 0.38 | 15.559 | 7.441 | 0.676 | 0.506 | Reject |
| 0.39 | 18.240 | 9.760 | 0.651 | 0.497 | Reject |
| 0.40 | 19.273 | 10.727 | 0.642 | 0.493 | Reject |
| 0.41 | 20.786 | 12.214 | 0.630 | 0.487 | Reject |
| 0.42 | 21.770 | 13.230 | 0.622 | 0.483 | Reject |
| 0.43 | 22.738 | 14.262 | 0.615 | 0.480 | Reject |
| 0.44 | 23.215 | 14.785 | 0.611 | 0.478 | Reject |
| 0.45 | 23.689 | 15.311 | 0.607 | 0.476 | Reject |
| 0.46 | 25.544 | 17.456 | 0.594 | 0.469 | Reject |
| 0.47 | 27.783 | 20.217 | 0.579 | 0.460 | Reject |
| 0.48 | 28.656 | 21.344 | 0.573 | 0.457 | Reject |
| 0.49 | 29.517 | 22.483 | 0.568 | 0.454 | Reject |
| 0.50 | 30.786 | 24.214 | 0.560 | 0.449 | Reject |
| 0.51 | 32.440 | 26.560 | 0.550 | 0.443 | Accept |

TABLE 25
Xpresys ® Lung (T_{RO}) performance at individual thresholds.

| | | | Negative | Positive | Likely Benign |
|---|---|---|---|---|---|
| Threshold | Sensitivity | Specificity | Predictive Value | Predictive Value | Rate |
| 0.00 | 1.000 | 0.000 | 0.981* | 0.231 | 0.000 |
| 0.01 | 1.000 | 0.000 | 0.981* | 0.231 | 0.000 |
| 0.02 | 1.000 | 0.000 | 0.981* | 0.231 | 0.000 |
| 0.03 | 1.000 | 0.000 | 0.981* | 0.231 | 0.000 |
| 0.04 | 1.000 | 0.000 | 0.981* | 0.231 | 0.000 |
| 0.05 | 1.000 | 0.000 | 0.981* | 0.231 | 0.000 |
| 0.06 | 1.000 | 0.000 | 0.981* | 0.231 | 0.000 |
| 0.07 | 1.000 | 0.000 | 0.981* | 0.231 | 0.000 |
| 0.08 | 1.000 | 0.000 | 0.981* | 0.231 | 0.000 |
| 0.09 | 1.000 | 0.000 | 0.981* | 0.231 | 0.000 |
| 0.10 | 1.000 | 0.000 | 0.981* | 0.231 | 0.000 |
| 0.11 | 1.000 | 0.000 | 0.981* | 0.231 | 0.000 |
| 0.12 | 1.000 | 0.000 | 0.981* | 0.231 | 0.000 |
| 0.13 | 1.000 | 0.000 | 0.981* | 0.231 | 0.000 |
| 0.14 | 1.000 | 0.000 | 0.981* | 0.231 | 0.000 |
| 0.15 | 1.000 | 0.000 | 0.981* | 0.231 | 0.000 |
| 0.16 | 1.000 | 0.000 | 0.981* | 0.231 | 0.000 |
| 0.17 | 1.000 | 0.000 | 0.981* | 0.231 | 0.000 |
| 0.18 | 1.000 | 0.000 | 0.981* | 0.231 | 0.000 |
| 0.19 | 1.000 | 0.000 | 0.981* | 0.231 | 0.000 |
| 0.20 | 1.000 | 0.000 | 0.981* | 0.231 | 0.000 |
| 0.21 | 1.000 | 0.000 | 0.981* | 0.231 | 0.000 |
| 0.22 | 0.999 | 0.017 | 0.981 | 0.234 | 0.013 |
| 0.23 | 0.999 | 0.017 | 0.981 | 0.234 | 0.013 |
| 0.24 | 0.999 | 0.017 | 0.981 | 0.234 | 0.013 |
| 0.25 | 0.997 | 0.033 | 0.972 | 0.236 | 0.026 |
| 0.26 | 0.997 | 0.033 | 0.972 | 0.236 | 0.026 |
| 0.27 | 0.994 | 0.048 | 0.965 | 0.239 | 0.038 |
| 0.28 | 0.991 | 0.062 | 0.959 | 0.241 | 0.050 |
| 0.29 | 0.988 | 0.076 | 0.954 | 0.243 | 0.061 |
| 0.30 | 0.984 | 0.089 | 0.949 | 0.245 | 0.072 |
| 0.31 | 0.984 | 0.089 | 0.949 | 0.245 | 0.072 |
| 0.32 | 0.971 | 0.128 | 0.936 | 0.251 | 0.105 |
| 0.33 | 0.956 | 0.164 | 0.926 | 0.256 | 0.136 |
| 0.34 | 0.951 | 0.176 | 0.923 | 0.257 | 0.146 |
| 0.35 | 0.945 | 0.187 | 0.920 | 0.259 | 0.157 |
| 0.36 | 0.934 | 0.209 | 0.914 | 0.262 | 0.176 |
| 0.37 | 0.916 | 0.242 | 0.906 | 0.266 | 0.205 |
| 0.38 | 0.891 | 0.283 | 0.896 | 0.272 | 0.243 |
| 0.39 | 0.856 | 0.332 | 0.885 | 0.278 | 0.288 |
| 0.40 | 0.842 | 0.350 | 0.881 | 0.280 | 0.306 |
| 0.41 | 0.820 | 0.378 | 0.875 | 0.284 | 0.332 |
| 0.42 | 0.805 | 0.396 | 0.871 | 0.286 | 0.349 |
| 0.43 | 0.790 | 0.413 | 0.868 | 0.288 | 0.366 |
| 0.44 | 0.783 | 0.422 | 0.866 | 0.289 | 0.375 |
| 0.45 | 0.775 | 0.431 | 0.864 | 0.290 | 0.383 |
| 0.46 | 0.743 | 0.464 | 0.858 | 0.294 | 0.416 |
| 0.47 | 0.703 | 0.505 | 0.850 | 0.299 | 0.457 |
| 0.48 | 0.686 | 0.521 | 0.847 | 0.301 | 0.473 |
| 0.49 | 0.669 | 0.537 | 0.844 | 0.303 | 0.489 |
| 0.50 | 0.644 | 0.560 | 0.840 | 0.305 | 0.513 |

*Set to this value due to a lack of data.

TABLE 26
Outcomes of testing the null hypotheses frac_{T} < frac_{LB} of the primary aim at
individual thresholds of Classifier 2.

| Threshold | TP_{T,f} | FP_{T,f} | frac_{T,f} | frac_{T, L} | Null hypothesis |
|---|---|---|---|---|---|
| 0.60 | 26.326 | 10.674 | 0.712 | 0.580 | Reject |
| 0.59 | 26.326 | 10.674 | 0.712 | 0.580 | Reject |
| 0.58 | 26.916 | 11.084 | 0.708 | 0.578 | Reject |
| 0.57 | 27.502 | 11.498 | 0.705 | 0.577 | Reject |
| 0.56 | 27.502 | 11.498 | 0.705 | 0.577 | Reject |
| 0.55 | 28.085 | 11.915 | 0.702 | 0.575 | Reject |
| 0.54 | 28.085 | 11.915 | 0.702 | 0.575 | Reject |
| 0.53 | 28.664 | 12.336 | 0.699 | 0.574 | Reject |
| 0.52 | 29.241 | 12.759 | 0.696 | 0.572 | Reject |
| 0.51 | 29.241 | 12.759 | 0.696 | 0.572 | Reject |
| 0.50 | 29.241 | 12.759 | 0.696 | 0.572 | Reject |
| 0.49 | 29.815 | 13.185 | 0.693 | 0.571 | Reject |
| 0.48 | 29.815 | 13.185 | 0.693 | 0.571 | Reject |
| 0.47 | 30.954 | 14.046 | 0.688 | 0.568 | Reject |
| 0.46 | 32.084 | 14.916 | 0.683 | 0.565 | Reject |
| 0.45 | 33.763 | 16.237 | 0.675 | 0.561 | Reject |
| 0.44 | 34.874 | 17.126 | 0.671 | 0.558 | Reject |
| 0.43 | 35.980 | 18.020 | 0.666 | 0.556 | Reject |
| 0.42 | 37.083 | 18.917 | 0.662 | 0.554 | Reject |
| 0.41 | 37.083 | 18.917 | 0.662 | 0.554 | Reject |
| 0.40 | 37.083 | 18.917 | 0.662 | 0.554 | Reject |
| 0.39 | 37.083 | 18.917 | 0.662 | 0.554 | Reject |
| 0.38 | 37.634 | 19.366 | 0.660 | 0.553 | Reject |
| 0.37 | 37.634 | 19.366 | 0.660 | 0.553 | Reject |
| 0.36 | 38.185 | 19.815 | 0.658 | 0.552 | Reject |
| 0.35 | 38.185 | 19.815 | 0.658 | 0.552 | Reject |
| 0.34 | 38.185 | 19.815 | 0.658 | 0.552 | Reject |
| 0.33 | 38.185 | 19.815 | 0.658 | 0.552 | Reject |
| 0.32 | 39.845 | 21.155 | 0.653 | 0.549 | Reject |
| 0.31 | 40.403 | 21.597 | 0.652 | 0.548 | Reject |
| 0.30 | 40.403 | 21.597 | 0.652 | 0.548 | Reject |
| 0.29 | 40.965 | 22.035 | 0.650 | 0.548 | Reject |
| 0.28 | 40.965 | 22.035 | 0.650 | 0.548 | Reject |
| 0.27 | 40.965 | 22.035 | 0.650 | 0.548 | Reject |
| 0.26 | 42.109 | 22.891 | 0.648 | 0.547 | Reject |
| 0.25 | 42.109 | 22.891 | 0.648 | 0.547 | Reject |
| 0.24 | 42.109 | 22.891 | 0.648 | 0.547 | Reject |
| 0.23 | 42.109 | 22.891 | 0.648 | 0.547 | Reject |
| 0.22 | 42.109 | 22.891 | 0.648 | 0.547 | Reject |
| 0.21 | 42.109 | 22.891 | 0.648 | 0.547 | Reject |
| 0.20 | 42.109 | 22.891 | 0.648 | 0.547 | Reject |
| 0.19 | 42.109 | 22.891 | 0.648 | 0.547 | Reject |
| 0.18 | 42.699 | 23.301 | 0.647 | 0.547 | Reject |
| 0.17 | 42.699 | 23.301 | 0.647 | 0.547 | Reject |
| 0.16 | 43.313 | 23.687 | 0.646 | 0.547 | Reject |
| 0.15 | 43.313 | 23.687 | 0.646 | 0.547 | Reject |
| 0.14 | 43.313 | 23.687 | 0.646 | 0.547 | Reject |
| 0.13 | 43.313 | 23.687 | 0.646 | 0.547 | Reject |
| 0.12 | 43.313 | 23.687 | 0.646 | 0.547 | Reject |
| 0.11 | 43.313 | 23.687 | 0.646 | 0.547 | Reject |
| 0.10 | 43.313 | 23.687 | 0.646 | 0.547 | Reject |
| 0.09 | 43.313 | 23.687 | 0.646 | 0.547 | Reject |
| 0.08 | 43.313 | 23.687 | 0.646 | 0.547 | Reject |
| 0.07 | 44.000 | 24.000 | 0.647 | 0.548 | Reject |
| 0.06 | 44.000 | 24.000 | 0.647 | 0.548 | Reject |
| 0.05 | 44.000 | 24.000 | 0.647 | 0.548 | Reject |
| 0.04 | 44.000 | 24.000 | 0.647 | 0.548 | Reject |
| 0.03 | 44.000 | 24.000 | 0.647 | 0.548 | Reject |
| 0.02 | 44.000 | 24.000 | 0.647 | 0.548 | Reject |
| 0.01 | 44.000 | 24.000 | 0.647 | 0.548 | Reject |
| 0.00 | 44.000 | 24.000 | 0.647 | 0.548 | Reject |
| 0.61 | 25.733 | 10.267 | 0.715 | 0.581 | Reject |
| 0.62 | 25.136 | 9.864 | 0.718 | 0.583 | Reject |
| 0.63 | 24.536 | 9.464 | 0.722 | 0.585 | Reject |
| 0.64 | 24.536 | 9.464 | 0.722 | 0.585 | Reject |
| 0.65 | 24.536 | 9.464 | 0.722 | 0.585 | Reject |
| 0.66 | 23.931 | 9.069 | 0.725 | 0.586 | Reject |
| 0.67 | 23.931 | 9.069 | 0.725 | 0.586 | Reject |
| 0.68 | 23.931 | 9.069 | 0.725 | 0.586 | Reject |
| 0.69 | 23.323 | 8.677 | 0.729 | 0.588 | Reject |
| 0.70 | 23.323 | 8.677 | 0.729 | 0.588 | Reject |
| 0.71 | 22.710 | 8.290 | 0.733 | 0.590 | Reject |
| 0.72 | 22.093 | 7.907 | 0.736 | 0.591 | Reject |
| 0.73 | 22.093 | 7.907 | 0.736 | 0.591 | Reject |
| 0.74 | 22.093 | 7.907 | 0.736 | 0.591 | Reject |
| 0.75 | 21.471 | 7.529 | 0.740 | 0.593 | Reject |
| 0.76 | 20.844 | 7.156 | 0.744 | 0.595 | Reject |
| 0.77 | 18.933 | 6.067 | 0.757 | 0.599 | Reject |
| 0.78 | 18.286 | 5.714 | 0.762 | 0.601 | Reject |
| 0.79 | 18.286 | 5.714 | 0.762 | 0.601 | Reject |
| 0.80 | 17.632 | 5.368 | 0.767 | 0.602 | Reject |
| 0.81 | 16.973 | 5.027 | 0.771 | 0.604 | Reject |
| 0.82 | 16.307 | 4.693 | 0.777 | 0.605 | Reject |
| 0.83 | 14.955 | 4.045 | 0.787 | 0.608 | Reject |
| 0.84 | 14.955 | 4.045 | 0.787 | 0.608 | Reject |
| 0.85 | 13.575 | 3.425 | 0.799 | 0.609 | Reject |
| 0.86 | 13.575 | 3.425 | 0.799 | 0.609 | Reject |
| 0.87 | 12.164 | 2.836 | 0.811 | 0.610 | Reject |
| 0.88 | 11.445 | 2.555 | 0.818 | 0.610 | Reject |
| 0.89 | 11.445 | 2.555 | 0.818 | 0.610 | Reject |
| 0.90 | 9.980 | 2.020 | 0.832 | 0.608 | Reject |
| 0.91 | 7.703 | 1.297 | 0.856 | 0.598 | Reject |
| 0.92 | 6.124 | 0.876 | 0.875 | 0.581 | Reject |
| 0.93 | 5.313 | 0.687 | 0.885 | 0.567 | Reject |
| 0.94 | 5.313 | 0.687 | 0.885 | 0.567 | Reject |
| 0.95 | 5.313 | 0.687 | 0.885 | 0.567 | Reject |
| 0.96 | 2.772 | 0.228 | 0.924 | 0.461 | Reject |
| 0.97 | 1.882 | 0.118 | 0.941 | 0.371 | Accept |

TABLE 27
Outcomes of testing the null hypotheses frac_{T} < frac_{C} of the secondary
aim at individual thresholds of Classifier 2.

| Threshold | TP_{T,f} | FP_{T,f} | frac_{T,f} | frac_{T, L} | Null hypothesis |
|---|---|---|---|---|---|
| 0.60 | 26.326 | 10.674 | 0.712 | 0.580 | Reject |
| 0.59 | 26.326 | 10.674 | 0.712 | 0.580 | Reject |
| 0.58 | 26.916 | 11.084 | 0.708 | 0.578 | Reject |
| 0.57 | 27.502 | 11.498 | 0.705 | 0.577 | Reject |
| 0.56 | 27.502 | 11.498 | 0.705 | 0.577 | Reject |
| 0.55 | 28.085 | 11.915 | 0.702 | 0.575 | Reject |
| 0.54 | 28.085 | 11.915 | 0.702 | 0.575 | Reject |
| 0.53 | 28.664 | 12.336 | 0.699 | 0.574 | Reject |
| 0.52 | 29.241 | 12.759 | 0.696 | 0.572 | Reject |
| 0.51 | 29.241 | 12.759 | 0.696 | 0.572 | Reject |
| 0.50 | 29.241 | 12.759 | 0.696 | 0.572 | Reject |
| 0.49 | 29.815 | 13.185 | 0.693 | 0.571 | Reject |
| 0.48 | 29.815 | 13.185 | 0.693 | 0.571 | Reject |
| 0.47 | 30.954 | 14.046 | 0.688 | 0.568 | Reject |
| 0.46 | 32.084 | 14.916 | 0.683 | 0.565 | Reject |
| 0.45 | 33.763 | 16.237 | 0.675 | 0.561 | Reject |
| 0.44 | 34.874 | 17.126 | 0.671 | 0.558 | Reject |
| 0.43 | 35.980 | 18.020 | 0.666 | 0.556 | Reject |
| 0.42 | 37.083 | 18.917 | 0.662 | 0.554 | Reject |
| 0.41 | 37.083 | 18.917 | 0.662 | 0.554 | Reject |
| 0.40 | 37.083 | 18.917 | 0.662 | 0.554 | Reject |

TABLE 28
Performance of Classifier 2 at individual thresholds. The Likely Cancer
Rate was the percentage of intended use population being classified
as Likely Cancer.

| | | | Positive Predictive | Likely Cancer |
|---|---|---|---|---|
| Threshold | Sensitivity | Specificity | Value | Rate |
| 0.00 | 1.000 | 0.000 | 0.305 | 0.487 |
| 0.01 | 1.000 | 0.000 | 0.305 | 0.487 |
| 0.02 | 1.000 | 0.000 | 0.305 | 0.487 |
| 0.03 | 1.000 | 0.000 | 0.305 | 0.487 |
| 0.04 | 1.000 | 0.000 | 0.305 | 0.487 |
| 0.05 | 1.000 | 0.000 | 0.305 | 0.487 |
| 0.06 | 1.000 | 0.000 | 0.305 | 0.487 |
| 0.07 | 1.000 | 0.000 | 0.305 | 0.487 |
| 0.08 | 0.984 | 0.013 | 0.305* | 0.480 |
| 0.09 | 0.984 | 0.013 | 0.305* | 0.480 |
| 0.10 | 0.984 | 0.013 | 0.305* | 0.480 |
| 0.11 | 0.984 | 0.013 | 0.305* | 0.480 |
| 0.12 | 0.984 | 0.013 | 0.305* | 0.480 |
| 0.13 | 0.984 | 0.013 | 0.305* | 0.480 |
| 0.14 | 0.984 | 0.013 | 0.305* | 0.480 |
| 0.15 | 0.984 | 0.013 | 0.305* | 0.480 |
| 0.16 | 0.984 | 0.013 | 0.305* | 0.480 |
| 0.17 | 0.970 | 0.029 | 0.305* | 0.473 |
| 0.18 | 0.970 | 0.029 | 0.305* | 0.473 |
| 0.19 | 0.957 | 0.046 | 0.306 | 0.465 |
| 0.20 | 0.957 | 0.046 | 0.306 | 0.465 |
| 0.21 | 0.957 | 0.046 | 0.306 | 0.465 |
| 0.22 | 0.957 | 0.046 | 0.306 | 0.465 |
| 0.23 | 0.957 | 0.046 | 0.306 | 0.465 |
| 0.24 | 0.957 | 0.046 | 0.306 | 0.465 |
| 0.25 | 0.957 | 0.046 | 0.306 | 0.465 |
| 0.26 | 0.957 | 0.046 | 0.306 | 0.465 |
| 0.27 | 0.931 | 0.082 | 0.308 | 0.449 |
| 0.28 | 0.931 | 0.082 | 0.308 | 0.449 |
| 0.29 | 0.931 | 0.082 | 0.308 | 0.449 |
| 0.30 | 0.918 | 0.100 | 0.309 | 0.441 |
| 0.31 | 0.918 | 0.100 | 0.309 | 0.441 |
| 0.32 | 0.906 | 0.119 | 0.311 | 0.433 |
| 0.33 | 0.868 | 0.174 | 0.316 | 0.408 |
| 0.34 | 0.868 | 0.174 | 0.316 | 0.408 |
| 0.35 | 0.868 | 0.174 | 0.316 | 0.408 |
| 0.36 | 0.868 | 0.174 | 0.316 | 0.408 |
| 0.37 | 0.855 | 0.193 | 0.317 | 0.400 |
| 0.38 | 0.855 | 0.193 | 0.317 | 0.400 |
| 0.39 | 0.843 | 0.212 | 0.319 | 0.392 |
| 0.40 | 0.843 | 0.212 | 0.319 | 0.392 |
| 0.41 | 0.843 | 0.212 | 0.319 | 0.392 |
| 0.42 | 0.843 | 0.212 | 0.319 | 0.392 |
| 0.43 | 0.818 | 0.249 | 0.323 | 0.376 |
| 0.44 | 0.793 | 0.286 | 0.328 | 0.359 |
| 0.45 | 0.767 | 0.323 | 0.332 | 0.343 |
| 0.46 | 0.729 | 0.379 | 0.340 | 0.319 |
| 0.47 | 0.704 | 0.415 | 0.345 | 0.303 |
| 0.48 | 0.678 | 0.451 | 0.351 | 0.287 |
| 0.49 | 0.678 | 0.451 | 0.351 | 0.287 |
| 0.50 | 0.665 | 0.468 | 0.354 | 0.279 |
| 0.51 | 0.665 | 0.468 | 0.354 | 0.279 |
| 0.52 | 0.665 | 0.468 | 0.354 | 0.279 |
| 0.53 | 0.651 | 0.486 | 0.357 | 0.271 |
| 0.54 | 0.638 | 0.504 | 0.361 | 0.263 |
| 0.55 | 0.638 | 0.504 | 0.361 | 0.263 |
| 0.56 | 0.625 | 0.521 | 0.364 | 0.255 |
| 0.57 | 0.625 | 0.521 | 0.364 | 0.255 |
| 0.58 | 0.612 | 0.538 | 0.368 | 0.247 |
| 0.59 | 0.598 | 0.555 | 0.371 | 0.239 |
| 0.60 | 0.598 | 0.555 | 0.371 | 0.239 |
| 0.61 | 0.585 | 0.572 | 0.375 | 0.232 |
| 0.62 | 0.571 | 0.589 | 0.379 | 0.224 |
| 0.63 | 0.558 | 0.606 | 0.383 | 0.216 |
| 0.64 | 0.558 | 0.606 | 0.383 | 0.216 |
| 0.65 | 0.558 | 0.606 | 0.383 | 0.216 |
| 0.66 | 0.544 | 0.622 | 0.387 | 0.209 |
| 0.67 | 0.544 | 0.622 | 0.387 | 0.209 |
| 0.68 | 0.544 | 0.622 | 0.387 | 0.209 |
| 0.69 | 0.530 | 0.638 | 0.391 | 0.201 |
| 0.70 | 0.530 | 0.638 | 0.391 | 0.201 |
| 0.71 | 0.516 | 0.655 | 0.396 | 0.194 |
| 0.72 | 0.502 | 0.671 | 0.401 | 0.186 |
| 0.73 | 0.502 | 0.671 | 0.401 | 0.186 |
| 0.74 | 0.502 | 0.671 | 0.401 | 0.186 |
| 0.75 | 0.488 | 0.686 | 0.406 | 0.179 |
| 0.76 | 0.474 | 0.702 | 0.411 | 0.171 |
| 0.77 | 0.430 | 0.747 | 0.428 | 0.149 |
| 0.78 | 0.416 | 0.762 | 0.434 | 0.142 |
| 0.79 | 0.416 | 0.762 | 0.434 | 0.142 |
| 0.80 | 0.401 | 0.776 | 0.440 | 0.135 |
| 0.81 | 0.386 | 0.791 | 0.447 | 0.128 |
| 0.82 | 0.371 | 0.804 | 0.454 | 0.121 |
| 0.83 | 0.340 | 0.831 | 0.470 | 0.108 |
| 0.84 | 0.340 | 0.831 | 0.470 | 0.108 |
| 0.85 | 0.309 | 0.857 | 0.487 | 0.094 |
| 0.86 | 0.309 | 0.857 | 0.487 | 0.094 |
| 0.87 | 0.276 | 0.882 | 0.507 | 0.081 |
| 0.88 | 0.260 | 0.894 | 0.517 | 0.075 |
| 0.89 | 0.260 | 0.894 | 0.517 | 0.075 |
| 0.90 | 0.227 | 0.916 | 0.542 | 0.062 |
| 0.91 | 0.175 | 0.946 | 0.587 | 0.044 |
| 0.92 | 0.139 | 0.963 | 0.626 | 0.033 |
| 0.93 | 0.121 | 0.971 | 0.649 | 0.028 |
| 0.94 | 0.121 | 0.971 | 0.649 | 0.028 |
| 0.95 | 0.121 | 0.971 | 0.649 | 0.028 |
| 0.96 | 0.063 | 0.991 | 0.745 | 0.013 |
| 0.97 | 0.043 | 0.995 | 0.792 | 0.008 |
| 0.98 | 0.022 | 0.998 | 0.858 | 0.004 |
| 0.99 | 0.000 | 1.000 | 0.858^{#} | 0.000 |
| 1.00 | 0.000 | 1.000 | 0.858^{#} | 0.000 |

*Set to this value to ensure monotonicity of the PPV. The absolute difference between the actual and the set values was smaller than 0.0006.
^{#}Set to this value due to a lack of data.

### Informal Sequence Listing

| | | | SEQ |
|---|---|---|---|
| | | Uniprot | ID |
| Protein Name | Amino Acid Sequence | No. | NO: |
| ISLR | MQELHLLWWALLLGLAQACPEPCDCGEKYGFQIADCAYRDL | O14498 | 1 |
| | ESVPPGFPANVTTLSLSANRLPGLPEGAFREVPLLQSLWLA | | |
| | HNEIRTVAAGALASLSHLKSLDLSHNLISDFAWSDLHNLSA | | |
| | LQLLKMDSNELTFIPRDAFRSLRALRSLQLNHNRLHTLAEG | | |
| | TFTPLTALSHLQINENPFDCTCGIVWLKTWALTTAVSIPEQ | | |
| | DNIACTSPHVLKGTPLSRLPPLPCSAPSVQLSYQPSQDGAE | | |
| | LRPGFVLALHCDVDGQPAPQLHWHIQIPSGIVEITSPNVGT | | |
| | DGRALPGTPVASSQPRFQAFANGSLLIPDFGKLEEGTYSCL | | |
| | ATNELGSAESSVDVALATPGEGGEDTLGRRFHGKAVEGKGC | | |
| | YTVDNEVQPSGPEDNVVIIYLSRAGNPEAAVAEGVPGQLPP | | |
| | GLLLLGQSLLLFFFLTSF | | |
| ALDOA | MPYQYPALTPEQKKELSDIAHRIVAPGKGILAADESTGSIA | P04075 | 2 |
| | KRLQSIGTENTEENRRFYRQLLLTADDRVNPCIGGVILFHE | | |
| | TLYQKADDGRPFPQVIKSKGGVVGIKVDKGVVPLAGTNGET | | |
| | TTQGLDGLSERCAQYKKDGADFAKWRCVLKIGEHTPSALAI | | |
| | MENANVLARYASICQQNGIVPIVEPEILPDGDHDLKRCQYV | | |
| | TEKVLAAVYKALSDHHIYLEGTLLKPNMVTPGHACTQKFSH | | |
| | EEIAMATVTALRRTVPPAVTGITFLSGGQSEEEASINLNAI | | |
| | NKCPLLKPWALTFSYGRALQASALKAWGGKKENLKAAQEEY | | |
| | VKRALANSLACQGKYTPSGQAGAAASESLFVSNHAY | | |
| ALDOA | MPYQYPALTPEQKKELSDIAHRIVAPGKGILAADESTGSIA | P04075 | 3 |
| (isoform 2) | KRLQSIGTENTEENRRFYRQLLLTADDRVNPCIGGVILFHE | [1-1] | |
| | TLYQKADDGRPFPQVIKSKGGVVGIKVDKGVVPLAGTNGET | | |
| | TTQGLDGLSERCAQYKKDGADFAKWRCVLKIGEHTPSALAI | | |
| | MENANVLARYASICQQNGIVPIVEPEILPDGDHDLKRCQYV | | |
| | TEKVLAAVYKALSDHHIYLEGTLLKPNMVTPGHACTQKFSH | | |
| | EEIAMATVTALRRTVPPAVTGITFLSGGQSEEEASINLNAI | | |
| | NKCPLLKPWALTFSYGRALQASALKAWGGKKENLKAAQEEY | | |
| | VKRALANSLACQGKYTPSGQAGAAASESLFVSNHAY | | |
| CD14 | MERASCLLLLLLPLVHVSATTPEPCELDDEDFRCVCNFSEP | 08571-1 | 4 |
| | QPDWSEAFQCVSAVEVEIHAGGLNLEPFLKRVDADADPRQY | | |
| | ADTVKALRVRRLTVGAAQVPAQLLVGALRVLAYSRLKELTL | | |
| | EDLKITGTMPPLPLEATGLALSSLRLRNVSWATGRSWLAEL | | |
| | QQWLKPGLKVLSIAQAHSPAFSCEQVRAFPALTSLDLSDNP | | |
| | GLGERGLMAALCPHKFPAIQNLALRNTGMETPTGVCAALAA | | |
| | AGVQPHSLDLSHNSLRATVNPSAPRCMWSSALNSLNLSFAG | | |
| | LEQVPKGLPAKLRVLDLSCNRLNRAPQPDELPEVDNLTLDG | | |
| | NPFLVPGTALPHEGSMNSGVVPACARSTLSVGVSGTLVLLQ | | |
| | GARGFA | | |
| COIA1 | MAPYPCGCHILLLLFCCLAAARANLLNLNWLWFNNEDTSHA | P39060-3 | 5 |
| (isoform-1) | ATTIPEPQGPLPVQPTADTTTHVTPRNGSTEPATAPGSPEP | | |
| | PSELLEDGQDTPTSAESPDAPEENIAGVGAEILNVAKGIRS | | |
| | FVQLWNDTVPTESLARAETLVLETPVGPLALAGPSSTPQEN | | |
| | GTTLWPSRGIPSSPGAHTTEAGTLPAPTPSPPSLGRPWAPL | | |
| | TGPSVPPPSSGRASLSSLLGGAPPWGSLQDPDSQGLSPAAA | | |
| | APSQQLQRPDVRLRTPLLHPLVMGSLGKHAAPSAFSSGLPG | | |
| | ALSQVAVTTLTRDSGAWVSHVANSVGPGLANNSALLGADPE | | |
| | APAGRCLPLPPSLPVCGHLGISRFWLPNHLHHESGEQVRAG | | |
| | ARAWGGLLQTHCHPFLAWFFCLLLVPPCGSVPPPAPPPCCQ | | |
| | FCEALQDACWSRLGGGRLPVACASLPTQEDGYCVLIGPAAE | | |
| | RISEEVGLLQLLGDPPPQQVTQTDDPDVGLAYVFGPDANSG | | |
| | QVARYHFPSLFFRDFSLLFHIRPATEGPGVLFAITDSAQAM | | |
| | VLLGVKLSGVQDGHQDISLLYTEPGAGQTHTAASFRLPAFV | | |
| | GQWTHLALSVAGGFVALYVDCEEFQRMPLARSSRGLELEPG | | |
| | AGLFVAQAGGADPDKFQGVIAELKVRRDPQVSPMHCLDEEG | | |
| | DDSDGASGDSGSGLGDARELLREETGAALKPRLPAPPPVTT | | |
| | PPLAGGSSTEDSRSEEVEEQTTVASLGAQTLPGSDSVSTWD | | |
| | GSVRTPGGRVKEGGLKGQKGEPGVPGPPGRAGPPGSPCLPG | | |
| | PPGLPCPVSPLGPAGPALQTVPGPQGPPGPPGRDGTPGRDG | | |
| | EPGDPGEDGKPGDTGPQGFPGTPGDVGPKGDKGDPGVGERG | | |
| | PPGPQGPPGPPGPSFRHDKLTFIDMEGSGFGGDLEALRGPR | | |
| | GFPGPPGPPGVPGLPGEPGRFGVNSSDVPGPAGLPGVPGRE | | |
| | GPPGFPGLPGPPGPPGREGPPGRTGQKGSLGEAGAPGHKGS | | |
| | KGAPGPAGARGESGLAGAPGPAGPPGPPGPPGPPGPGLPAG | | |
| | FDDMEGSGGPFWSTARSADGPQGPPGLPGLKGDPGVPGLPG | | |
| | AKGEVGADGVPGFPGLPGREGIAGPQGPKGDRGSRGEKGDP | | |
| | GKDGVGQPGLPGPPGPPGPVVYVSEQDGSVLSVPGPEGRPG | | |
| | FAGFPGPAGPKGNLGSKGERGSPGPKGEKGEPGSIFSPDGG | | |
| | ALGPAQKGAKGEPGFRGPPGPYGRPGYKGEIGFPGRPGRPG | | |
| | MNGLKGEKGEPGDASLGFGMRGMPGPPGPPGPPGPPGTPVY | | |
| | DSNVFAESSRPGPPGLPGNQGPPGPKGAKGEVGPPGPPGQF | | |
| | PFDFLQLEAEMKGEKGDRGDAGQKGERGEPGGGGFFGSSLP | | |
| | GPPGPPGPPGPRGYPGIPGPKGESIRGQPGPPGPQGPPGIG | | |
| | YEGRQGPPGPPGPPGPPSFPGPHRQTISVPGPPGPPGPPGP | | |
| | PGTMGASSGVRLWATRQAMLGQVHEVPEGWLIFVAEQEELY | | |
| | VRVQNGFRKVQLEARTPLPRGTDNEVAALQPPVVQLHDSNP | | |
| | YPRREHPHPTARPWRADDILASPPRLPEPQPYPGAPHHSSY | | |
| | VHLRPARPTSPPAHSHRDFQPVLHLVALNSPLSGGMRGIRG | | |
| | ADFQCFQQARAVGLAGTFRAFLSSRLQDLYSIVRRADRAAV | | |
| | PIVNLKDELLFPSWEALFSGSEGPLKPGARIFSFDGKDVLR | | |
| | HPTWPQKSVWHGSDPNGRRLTESYCETWRTEAPSATGQASS | | |
| | LLGGRLLGQSAASCHHAYIVLCIENSFMTASK | | |
| COIA1 | MAPYPCGCHILLLLFCCLAAARANLLNLNWLWFNNEDTSHA | P39060-1 6 | |
| (isoform-2) | ATTIPEPQGPLPVQPTADTTTHVTPRNGSTEPATAPGSPEP | | |
| | PSELLEDGQDTPTSAESPDAPEENIAGVGAEILNVAKGIRS | | |
| | FVQLWNDTVPTESLARAETLVLETPVGPLALAGPSSTPQEN | | |
| | GTTLWPSRGIPSSPGAHTTEAGTLPAPTPSPPSLGRPWAPL | | |
| | TGPSVPPPSSERISEEVGLLQLLGDPPPQQVTQTDDPDVGL | | |
| | AYVFGPDANSGQVARYHFPSLFFRDFSLLFHIRPATEGPGV | | |
| | LFAITDSAQAMVLLGVKLSGVQDGHQDISLLYTEPGAGQTH | | |
| | TAASFRLPAFVGQWTHLALSVAGGFVALYVDCEEFQRMPLA | | |
| | RSSRGLELEPGAGLFVAQAGGADPDKFQGVIAELKVRRDPQ | | |
| | VSPMHCLDEEGDDSDGASGDSGSGLGDARELLREETGAALK | | |
| | PRLPAPPPVTTPPLAGGSSTEDSRSEEVEEQTTVASLGAQT | | |
| | LPGSDSVSTWDGSVRTPGGRVKEGGLKGQKGEPGVPGPPGR | | |
| | AGPPGSPCLPGPPGLPCPVSPLGPAGPALQTVPGPQGPPGP | | |
| | PGRDGTPGRDGEPGDPGEDGKPGDTGPQGFPGTPGDVGPKG | | |
| | DKGDPGVGERGPPGPQGPPGPPGPSFRHDKLTFIDMEGSGF | | |
| | GGDLEALRGPRGFPGPPGPPGVPGLPGEPGRFGVNSSDVPG | | |
| | PAGLPGVPGREGPPGFPGLPGPPGPPGREGPPGRTGQKGSL | | |
| | GEAGAPGHKGSKGAPGPAGARGESGLAGAPGPAGPPGPPGP | | |
| | PGPPGPGLPAGFDDMEGSGGPFWSTARSADGPQGPPGLPGL | | |
| | KGDPGVPGLPGAKGEVGADGVPGFPGLPGREGIAGPQGPKG | | |
| | DRGSRGEKGDPGKDGVGQPGLPGPPGPPGPVVYVSEQDGSV | | |
| | LSVPGPEGRPGFAGFPGPAGPKGNLGSKGERGSPGPKGEKG | | |
| | EPGSIFSPDGGALGPAQKGAKGEPGFRGPPGPYGRPGYKGE | | |
| | IGFPGRPGRPGMNGLKGEKGEPGDASLGFGMRGMPGPPGPP | | |
| | GPPGPPGTPVYDSNVFAESSRPGPPGLPGNQGPPGPKGAKG | | |
| | EVGPPGPPGQFPFDFLQLEAEMKGEKGDRGDAGQKGERGEP | | |
| | GGGGFFGSSLPGPPGPPGPPGPRGYPGIPGPKGESIRGQPG | | |
| | PPGPQGPPGIGYEGRQGPPGPPGPPGPPSFPGPHRQTISVP | | |
| | GPPGPPGPPGPPGTMGASSGVRLWATRQAMLGQVHEVPEGW | | |
| | LIFVAEQEELYVRVQNGFRKVQLEARTPLPRGTDNEVAALQ | | |
| | PPVVQLHDSNPYPRREHPHPTARPWRADDILASPPRLPEPQ | | |
| | PYPGAPHHSSYVHLRPARPTSPPAHSHRDFQPVLHLVALNS | | |
| | PLSGGMRGIRGADFQCFQQARAVGLAGTFRAFLSSRLQDLY | | |
| | SIVRRADRAAVPIVNLKDELLFPSWEALFSGSEGPLKPGAR | | |
| | IFSFDGKDVLRHPTWPQKSVWHGSDPNGRRLTESYCETWRT | | |
| | EAPSATGQASSLLGGRLLGQSAASCHHAYIVLCIENSFMTA | | |
| | SK | | |
| COIA1 | MAPRCPWPWPRRRRLLDVLAPLVLLLGVRAASAEPERISEE | P39060-2 7 | |
| (isoform-3) | VGLLQLLGDPPPQQVTQTDDPDVGLAYVFGPDANSGQVARY | | |
| | HFPSLFFRDFSLLFHIRPATEGPGVLFAITDSAQAMVLLGV | | |
| | KLSGVQDGHQDISLLYTEPGAGQTHTAASFRLPAFVGQWTH | | |
| | LALSVAGGFVALYVDCEEFQRMPLARSSRGLELEPGAGLFV | | |
| | AQAGGADPDKFQGVIAELKVRRDPQVSPMHCLDEEGDDSDG | | |
| | ASGDSGSGLGDARELLREETGAALKPRLPAPPPVTTPPLAG | | |
| | GSSTEDSRSEEVEEQTTVASLGAQTLPGSDSVSTWDGSVRT | | |
| | PGGRVKEGGLKGQKGEPGVPGPPGRAGPPGSPCLPGPPGLP | | |
| | CPVSPLGPAGPALQTVPGPQGPPGPPGRDGTPGRDGEPGDP | | |
| | GEDGKPGDTGPQGFPGTPGDVGPKGDKGDPGVGERGPPGPQ | | |
| | GPPGPPGPSFRHDKLTFIDMEGSGFGGDLEALRGPRGFPGP | | |
| | PGPPGVPGLPGEPGRFGVNSSDVPGPAGLPGVPGREGPPGF | | |
| | PGLPGPPGPPGREGPPGRTGQKGSLGEAGAPGHKGSKGAPG | | |
| | PAGARGESGLAGAPGPAGPPGPPGPPGPPGPGLPAGFDDME | | |
| | GSGGPFWSTARSADGPQGPPGLPGLKGDPGVPGLPGAKGEV | | |
| | GADGVPGFPGLPGREGIAGPQGPKGDRGSRGEKGDPGKDGV | | |
| | GQPGLPGPPGPPGPVVYVSEQDGSVLSVPGPEGRPGFAGFP | | |
| | GPAGPKGNLGSKGERGSPGPKGEKGEPGSIFSPDGGALGPA | | |
| | QKGAKGEPGFRGPPGPYGRPGYKGEIGFPGRPGRPGMNGLK | | |
| | GEKGEPGDASLGFGMRGMPGPPGPPGPPGPPGTPVYDSNVF | | |
| | AESSRPGPPGLPGNQGPPGPKGAKGEVGPPGPPGQFPFDFL | | |
| | QLEAEMKGEKGDRGDAGQKGERGEPGGGGFFGSSLPGPPGP | | |
| | PGPPGPRGYPGIPGPKGESIRGQPGPPGPQGPPGIGYEGRQ | | |
| | GPPGPPGPPGPPSFPGPHRQTISVPGPPGPPGPPGPPGTMG | | |
| | ASSGVRLWATRQAMLGQVHEVPEGWLIFVAEQEELYVRVQN | | |
| | GFRKVQLEARTPLPRGTDNEVAALQPPVVQLHDSNPYPRRE | | |
| | HPHPTARPWRADDILASPPRLPEPQPYPGAPHHSSYVHLRP | | |
| | ARPTSPPAHSHRDFQPVLHLVALNSPLSGGMRGIRGADFQC | | |
| | FQQARAVGLAGTFRAFLSSRLQDLYSIVRRADRAAVPIVNL | | |
| | KDELLFPSWEALFSGSEGPLKPGARIFSFDGKDVLRHPTWP | | |
| | QKSVWHGSDPNGRRLTESYCETWRTEAPSATGQASSLLGGR | | |
| | LLGQSAASCHHAYIVLCIENSFMTASK | | |
| IBP3 | MQRARPTLWAAALTLLVLLRGPPVARAGASSAGLGPVVRCE | P17936-1 | 8 |
| (isoform-1) | PCDARALAQCAPPPAVCAELVREPGCGCCLTCALSEGQPCG | | |
| | IYTERCGSGLRCQPSPDEARPLQALLDGRGLCVNASAVSRL | | |
| | RAYLLPAPPAPGNASESEEDRSAGSVESPSVSSTHRVSDPK | | |
| | FHPLHSKIIIIKKGHAKDSQRYKVDYESQSTDTQNFSSESK | | |
| | RETEYGPCRREMEDTLNHLKFLNVLSPRGVHIPNCDKKGFY | | |
| | KKKQCRPSKGRKRGFCWCVDKYGQPLPGYTTKGKEDVHCYS | | |
| | MQSK | | |
| IBP3 | MQRARPTLWAAALTLLVLLRGPPVARAGASSAGLGPVVRCE | P17936-2 | 9 |
| (isoform-2) | PCDARALAQCAPPPAVCAELVREPGCGCCLTCALSEGQPCG | | |
| | IYTERCGSGLRCQPSPDEARPLQALLDGRGLCVNASAVSRL | | |
| | RAYLLPAPPAPGEPPAPGNASESEEDRSAGSVESPSVSSTH | | |
| | RVSDPKFHPLHSKIIIIKKGHAKDSQRYKVDYESQSTDTQN | | |
| | FSSESKRETEYGPCRREMEDTLNHLKFLNVLSPRGVHIPNC | | |
| | DKKGFYKKKQCRPSKGRKRGFCWCVDKYGQPLPGYTTKGKE | | |
| | DVHCYSMQSK | | |
| TSP1 | MGLAWGLGVLFLMHVCGTNRIPESGGDNSVFDIFELTGAAR | P07996-1 | 10 |
| (isoform-1) | KGSGRRLVKGPDPSSPAFRIEDANLIPPVPDDKFQDLVDAV | | |
| | RAEKGFLLLASLRQMKKTRGTLLALERKDHSGQVFSVVSNG | | |
| | KAGTLDLSLTVQGKQHVVSVEEALLATGQWKSITLFVQEDR | | |
| | AQLYIDCEKMENAELDVPIQSVFTRDLASIARLRIAKGGVN | | |
| | DNFQGVLQNVRFVFGTTPEDILRNKGCSSSTSVLLTLDNNV | | |
| | VNGSSPAIRTNYIGHKTKDLQAICGISCDELSSMVLELRGL | | |
| | RTIVTTLQDSIRKVTEENKELANELRRPPLCYHNGVQYRNN | | |
| | EEWTVDSCTECHCQNSVTICKKVSCPIMPCSNATVPDGECC | | |
| | PRCWPSDSADDGWSPWSEWTSCSTSCGNGIQQRGRSCDSLN | | |
| | NRCEGSSVQTRTCHIQECDKRFKQDGGWSHWSPWSSCSVTC | | |
| | GDGVITRIRLCNSPSPQMNGKPCEGEARETKACKKDACPIN | | |
| | GGWGPWSPWDICSVTCGGGVQKRSRLCNNPTPQFGGKDCVG | | |
| | DVTENQICNKQDCPIDGCLSNPCFAGVKCTSYPDGSWKCGA | | |
| | CPPGYSGNGIQCTDVDECKEVPDACFNHNGEHRCENTDPGY | | |
| | NCLPCPPRFTGSQPFGQGVEHATANKQVCKPRNPCTDGTHD | | |
| | CNKNAKCNYLGHYSDPMYRCECKPGYAGNGIICGEDTDLDG | | |
| | WPNENLVCVANATYHCKKDNCPNLPNSGQEDYDKDGIGDAC | | |
| | DDDDDNDKIPDDRDNCPFHYNPAQYDYDRDDVGDRCDNCPY | | |
| | NHNPDQADTDNNGEGDACAADIDGDGILNERDNCQYVYNVD | | |
| | QRDTDMDGVGDQCDNCPLEHNPDQLDSDSDRIGDTCDNNQD | | |
| | IDEDGHQNNLDNCPYVPNANQADHDKDGKGDACDHDDDNDG | | |
| | IPDDKDNCRLVPNPDQKDSDGDGRGDACKDDFDHDSVPDID | | |
| | DICPENVDISETDFRRFQMIPLDPKGTSQNDPNWVVRHQGK | | |
| | ELVQTVNCDPGLAVGYDEFNAVDFSGTFFINTERDDDYAGF | | |
| | VFGYQSSSRFYVVMWKQVTQSYWDTNPTRAQGYSGLSVKVV | | |
| | NSTTGPGEHLRNALWHTGNTPGQVRTLWHDPRHIGWKDFTA | | |
| | YRWRLSHRPKTGFIRVVMYEGKKIMADSGPIYDKTYAGGRL | | |
| | GLFVFSQEMVFFSDLKYECRDP | | |
| TSP1 | MGLAWGLGVLFLMHVCGTLLALERKDHSGQVFSVVSNGKAG | P07996-2 | 11 |
| (isoform-2) | TLDLSLTVQGKQHVVSVEEALLATGQWKSITLFVQEDRAQL | | |
| | YIDCEKMENAELDVPIQSVFTRDLASIARLRIAKGGVNDNF | | |
| | QGVLQNVRFVFGTTPEDILRNKGCSSSTSVLLTLDNNVVNG | | |
| | SSPAIRTNYIGHKTKDLQAICGISCDELSSMVLELRGLRTI | | |
| | VTTLQDSIRKVTEENKELANELRRPPLCYHNGVQYRNNEEW | | |
| | TVDSCTECHCQNSVTICKKVSCPIMPCSNATVPDGECCPRC | | |
| | WPSDSADDGWSPWSEWTSCSTSCGNGIQQRGRSCDSLNNRC | | |
| | EGSSVQTRTCHIQECDKRFKQDGGWSHWSPWSSCSVTCGDG | | |
| | VITRIRLCNSPSPQMNGKPCEGEARETKACKKDACPINGGW | | |
| | GPWSPWDICSVTCGGGVQKRSRLCNNPTPQFGGKDCVGDVT | | |
| | ENQICNKQDCPIDGCLSNPCFAGVKCTSYPDGSWKCGACPP | | |
| | GYSGNGIQCTDVDECKEVPDACFNHNGEHRCENTDPGYNCL | | |
| | PCPPRFTGSQPFGQGVEHATANKQVCKPRNPCTDGTHDCNK | | |
| | NAKCNYLGHYSDPMYRCECKPGYAGNGIICGEDTDLDGWPN | | |
| | ENLVCVANATYHCKKDNCPNLPNSGQEDYDKDGIGDACDDD | | |
| | DDNDKIPDDRDNCPFHYNPAQYDYDRDDVGDRCDNCPYNHN | | |
| | PDQADTDNNGEGDACAADIDGDGILNERDNCQYVYNVDQRD | | |
| | TDMDGVGDQCDNCPLEHNPDQLDSDSDRIGDTCDNNQDIDE | | |
| | DGHQNNLDNCPYVPNANQADHDKDGKGDACDHDDDNDGIPD | | |
| | DKDNCRLVPNPDQKDSDGDGRGDACKDDFDHDSVPDIDDIC | | |
| | PENVDISETDFRRFQMIPLDPKGTSQNDPNWVVRHQGKELV | | |
| | QTVNCDPGLAVGYDEFNAVDFSGTFFINTERDDDYAGFVFG | | |
| | YQSSSRFYVVMWKQVTQSYWDTNPTRAQGYSGLSVKVVNST | | |
| | TGPGEHLRNALWHTGNTPGQVRTLWHDPRHIGWKDFTAYRW | | |
| | RLSHRPKTGFIRVVMYEGKKIMADSGPIYDKTYAGGRLGLF | | |
| | VFSQEMVFFSDLKYECRDP | | |
| FRIL | MSSQIRQNYSTDVEAAVNSLVNLYLQASYTYLSLGFYFDRD | P02792 | 12 |
| | DVALEGVSHFFRELAEEKREGYERLLKMQNQRGGRALFQDI | | |
| | KKPAEDEWGKTPDAMKAAMALEKKLNQALLDLHALGSARTD | | |
| | PHLCDFLETHFLDEEVKLIKKMGDHLTNLHRLGGPEAGLGE | | |
| | YLFERLTLKHD | | |
| BGH3 | MALFVRLLALALALALGPAATLAGPAKSPYQLVLQHSRLRG | Q15582 | 13 |
| | RQHGPNVCAVQKVIGTNRKYFTNCKQWYQRKICGKSTVISY | | |
| | ECCPGYEKVPGEKGCPAALPLSNLYETLGVVGSTTTQLYTD | | |
| | RTEKLRPEMEGPGSFTIFAPSNEAWASLPAEVLDSLVSNVN | | |
| | IELLNALRYHMVGRRVLTDELKHGMTLTSMYQNSNIQIHHY | | |
| | PNGIVTVNCARLLKADHHATNGVVHLIDKVISTITNNIQQI | | |
| | IEIEDTFETLRAAVAASGLNTMLEGNGQYTLLAPTNEAFEK | | |
| | IPSETLNRILGDPEALRDLLNNHILKSAMCAEAIVAGLSVE | | |
| | TLEGTTLEVGCSGDMLTINGKAIISNKDILATNGVIHYIDE | | |
| | LLIPDSAKTLFELAAESDVSTAIDLFRQAGLGNHLSGSERL | | |
| | TLLAPLNSVFKDGTPPIDAHTRNLLRNHIIKDQLASKYLYH | | |
| | GQTLETLGGKKLRVFVYRNSLCIENSCIAAHDKRGRYGTLF | | |
| | TMDRVLTPPMGTVMDVLKGDNRFSMLVAAIQSAGLTETLNR | | |
| | EGVYTVFAPTNEAFRALPPRERSRLLGDAKELANILKYHIG | | |
| | DEILVSGGIGALVRLKSLQGDKLEVSLKNNVVSVNKEPVAE | | |
| | PDIMATNGVVHVITNVLQPPANRPQERGDELADSALEIFKQ | | |
| | ASAFSRASQRSVRLAPVYQKLLERMKH | | |
| ENPL | MRALWVLGLCCVLLTFGSVRADDEVDVDGTVEEDLGKSREG | P14625 | 14 |
| | SRTDDEVVQREEEAIQLDGLNASQIRELREKSEKFAFQAEV | | |
| | NRMMKLIINSLYKNKEIFLRELISNASDALDKIRLISLTDE | | |
| | NALSGNEELTVKIKCDKEKNLLHVTDTGVGMTREELVKNLG | | |
| | TIAKSGTSEFLNKMTEAQEDGQSTSELIGQFGVGFYSAFLV | | |
| | ADKVIVTSKHNNDTQHIWESDSNEFSVIADPRGNTLGRGTT | | |
| | ITLVLKEEASDYLELDTIKNLVKKYSQFINFPIYVWSSKTE | | |
| | TVEEPMEEEEAAKEEKEESDDEAAVEEEEEEKKPKTKKVEK | | |
| | TVWDWELMNDIKPIWQRPSKEVEEDEYKAFYKSFSKESDDP | | |
| | MAYIHFTAEGEVTFKSILFVPTSAPRGLFDEYGSKKSDYIK | | |
| | LYVRRVFITDDFHDMMPKYLNFVKGVVDSDDLPLNVSRETL | | |
| | QQHKLLKVIRKKLVRKTLDMIKKIADDKYNDTFWKEFGTNI | | |
| | KLGVIEDHSNRTRLAKLLRFQSSHHPTDITSLDQYVERMKE | | |
| | KQDKIYFMAGSSRKEAESSPFVERLLKKGYEVIYLTEPVDE | | |
| | YCIQALPEFDGKRFQNVAKEGVKFDESEKTKESREAVEKEF | | |
| | EPLLNWMKDKALKDKIEKAVVSQRLTESPCALVASQYGWSG | | |
| | NMERIMKAQAYQTGKDISTNYYASQKKTFEINPRHPLIRDM | | |
| | LRRIKEDEDDKTVLDLAVVLFETATLRSGYLLPDTKAYGDR | | |
| | IERMLRLSLNIDPDAKVEEEPEEEPEETAEDTTEDTEQDED | | |
| | EEMDVGTDEEEETAKESTAEKDEL | | |
| GRP78 | MKLSLVAAMLLLLSAARAEEEDKKEDVGTVVGIDLGTTYSC | P11021 | 15 |
| | VGVFKNGRVEIIANDQGNRITPSYVAFTPEGERLIGDAAKN | | |
| | QLTSNPENTVFDAKRLIGRTWNDPSVQQDIKFLPFKVVEKK | | |
| | TKPYIQVDIGGGQTKTFAPEEISAMVLTKMKETAEAYLGKK | | |
| | VTHAVVTVPAYFNDAQRQATKDAGTIAGLNVMRIINEPTAA | | |
| | AIAYGLDKREGEKNILVFDLGGGTFDVSLLTIDNGVFEVVA | | |
| | TNGDTHLGGEDFDQRVMEHFIKLYKKKTGKDVRKDNRAVQK | | |
| | LRREVEKAKRALSSQHQARIEIESFYEGEDFSETLTRAKFE | | |
| | ELNMDLFRSTMKPVQKVLEDSDLKKSDIEIVLVGGSTRIP | | |
| | KIQQLVKEFFNGKEPSRGINPDEAVAYGAAVQAGVLSGDQD | | |
| | TGDLVLLDVCPLTLGIETVGGVMTKLIPRNTVVPTKKSQIF | | |
| | STASDNQPTVTIKVYEGERPLTKDNHLLGTFDLTGIPPAPR | | |
| | GVPQIEVTFEIDVNGILRVTAEDKGTGNKNKITITNDQNRL | | |
| | TPEEIERMVNDAEKFAEEDKKLKERIDTRNELESYAYSLKN | | |
| | QIGDKEKLGGKLSSEDKETMEKAVEEKIEWLESHQDADIED | | |
| | FKAKKKELEEIVQPIISKLYGSAGPPPTGEEDTAEKDEL | | |
| LG3BP | MTPPRLFWVWLLVAGTQGVNDGDMRLADGGATNQGRVEIFY | Q08380 | 16 |
| | RGQWGTVCDNLWDLTDASVVCRALGFENATQALGRAAFGQG | | |
| | SGPIMLDEVQCTGTEASLADCKSLGWLKSNCRHERDAGVVC | | |
| | TNETRSTHTLDLSRELSEALGQIFDSQRGCDLSISVNVQGE | | |
| | DALGFCGHTVILTANLEAQALWKEPGSNVTMSVDAECVPMV | | |
| | RDLLRYFYSRRIDITLSSVKCFHKLASAYGARQLQGYCASL | | |
| | FAILLPQDPSFQMPLDLYAYAVATGDALLEKLCLQFLAWNF | | |
| | EALTQAEAWPSVPTDLLQLLLPRSDLAVPSELALLKAVDTW | | |
| | SWGERASHEEVEGLVEKIRFPMMLPEELFELQFNLSLYWSH | | |
| | EALFQKKTLQALEFHTVPFQLLARYKGLNLTEDTYKPRIYT | | |
| | SPTWSAFVTDSSWSARKSQLVYQSRRGPLVKYSSDYFQAPS | | |
| | DYRYYPYQSFQTPQHPSFLFQDKRVSWSLVYLPTIQSCWNY | | |
| | GFSCSSDELPVLGLTKSGGSDRTIAYENKALMLCEGLFVAD | | |
| | VTDFEGWKAAIPSALDTNSSKSTSSFPCPAGHFNGFRTVIR | | |
| | PFYLTNSSGVD | | |
| PTPRJ | MKPAAREARLPPRSPGLRWALPLLLLLLRLGQILCAGGTPS | Q12913 | 17 |
| (isoform-1) | PIPDPSVATVATGENGITQISSTAESFHKQNGTGTPQVETN | | |
| | TSEDGESSGANDSLRTPEQGSNGTDGASQKTPSSTGPSPVF | | |
| | DIKAVSISPTNVILTWKSNDTAASEYKYVVKHKMENEKTIT | | |
| | VVHQPWCNITGLRPATSYVFSITPGIGNETWGDPRVIKVIT | | |
| | EPIPVSDLRVALTGVRKAALSWSNGNGTASCRVLLESIGSH | | |
| | EELTQDSRLQVNISGLKPGVQYNINPYLLQSNKTKGDPLGT | | |
| | EGGLDASNTERSRAGSPTAPVHDESLVGPVDPSSGQQSRDT | | |
| | EVLLVGLEPGTRYNATVYSQAANGTEGQPQAIEFRTNAIQV | | |
| | FDVTAVNISATSLTLIWKVSDNESSSNYTYKIHVAGETDSS | | |
| | NLNVSEPRAVIPGLRSSTFYNITVCPVLGDIEGTPGFLQVH | | |
| | TPPVPVSDFRVTVVSTTEIGLAWSSHDAESFQMHITQEGAG | | |
| | NSRVEITTNQSIIIGGLFPGTKYCFEIVPKGPNGTEGASRT | | |
| | VCNRTVPSAVFDIHVVYVTTTEMWLDWKSPDGASEYVYHLV | | |
| | IESKHGSNHTSTYDKAITLQGLIPGTLYNITISPEVDHVWG | | |
| | DPNSTAQYTRPSNVSNIDVSTNTTAATLSWQNFDDASPTYS | | |
| | YCLLIEKAGNSSNATQVVTDIGITDATVTELIPGSSYTVEI | | |
| | FAQVGDGIKSLEPGRKSFCTDPASMASFDCEVVPKEPALVL | | |
| | KWTCPPGANAGFELEVSSGAWNNATHLESCSSENGTEYRTE | | |
| | VTYLNFSTSYNISITTVSCGKMAAPTRNTCTTGITDPPPPD | | |
| | GSPNITSVSHNSVKVKFSGFEASHGPIKAYAVILTTGEAGH | | |
| | PSADVLKYTYEDFKKGASDTYVTYLIRTEEKGRSQSLSEVL | | |
| | KYEIDVGNESTTLGYYNGKLEPLGSYRACVAGFTNITFHPQ | | |
| | NKGLIDGAESYVSFSRYSDAVSLPQDPGVICGAVFGCIFGA | | |
| | LVIVTVGGFIFWRKKRKDAKNNEVSFSQIKPKKSKLIRVEN | | |
| | FEAYFKKQQADSNCGFAEEYEDLKLVGISQPKYAAELAENR | | |
| | GKNRYNNVLPYDISRVKLSVQTHSTDDYINANYMPGYHSKK | | |
| | DFIATQGPLPNTLKDFWRMVWEKNVYAIIMLTKCVEQGRTK | | |
| | CEEYWPSKQAQDYGDITVAMTSEIVLPEWTIRDFTVKNIQT | | |
| | SESHPLRQFHFTSWPDHGVPDTTDLLINFRYLVRDYMKQSP | | |
| | PESPILVHCSAGVGRTGTFIAIDRLIYQIENENTVDVYGIV | | |
| | YDLRMHRPLMVQTEDQYVFLNQCVLDIVRSQKDSKVDLIYQ | | |
| | NTTAMTIYENLAPVTTFGKTNGYIA | | |
| PTPRJ | MKPAAREARLPPRSPGLRWALPLLLLLLRLGQILCAGGTPS | Q12913-2 | 18 |
| (isoform-2) | PIPDPSVATVATGENGITQISSTAESFHKQNGTGTPQVETN | | |
| | TSEDGESSGANDSLRTPEQGSNGTDGASQKTPSSTGPSPVF | | |
| | DIKAVSISPTNVILTWKSNDTAASEYKYVVKHKMENEKTIT | | |
| | VVHQPWCNITGLRPATSYVFSITPGIGNETWGDPRVIKVIT | | |
| | EPIPVSDLRVALTGVRKAALSWSNGNGTASCRVLLESIGSH | | |
| | EELTQDSRLQVNISGLKPGVQYNINPYLLQSNKTKGDPLGT | | |
| | EGGLDASNTERSRAGSPTAPVHDESLVGPVDPSSGQQSRDT | | |
| | EVLLVGLEPGTRYNATVYSQAANGTEGQPQAIEFRTNAIQV | | |
| | FDVTAVNISATSLTLIWKVSDNESSSNYTYKIHVAGETDSS | | |
| | NLNVSEPRAVIPGLRSSTFYNITVCPVLGDIEGTPGFLQVH | | |
| | TPPVPVSDFRVTVVSTTEIGLAWSSHDAESFQMHITQEGAG | | |
| | NSRVEITTNQSIIIGGLFPGTKYCFEIVPKGPNGTEGASRT | | |
| | VCNRTG | | |
| TENX | MMPAQYALTSSLVLLVLLSTARAGPFSSRSNVTLPAPRPPP | P22105 | 19 |
| (isoform-3) | QPGGHTVGAGVGSPSSQLYEHTVEGGEKQVVFTHRINLPPS | | |
| | TGCGCPPGTEPPVLASEVQALRVRLEILEELVKGLKEQCTG | | |
| | GCCPASAQAGTGQTDVRTLCSLHGVFDLSRCTCSCEPGWGG | | |
| | PTCSDPTDAEIPPSSPPSASGSCPDDCNDQGRCVRGRCVCF | | |
| | PGYTGPSCGWPSCPGDCQGRGRCVQGVCVCRAGFSGPDCSQ | | |
| | RSCPRGCSQRGRCEGGRCVCDPGYTGDDCGMRSCPRGCSQR | | |
| | GRCENGRCVCNPGYTGEDCGVRSCPRGCSQRGRCKDGRCVC | | |
| | DPGYTGEDCGTRSCPWDCGEGGRCVDGRCVCWPGYTGEDCS | | |
| | TRTCPRDCRGRGRCEDGECICDTGYSGDDCGVRSCPGDCNQ | | |
| | RGRCEDGRCVCWPGYTGTDCGSRACPRDCRGRGRCENGVCV | | |
| | CNAGYSGEDCGVRSCPGDCRGRGRCESGRCMCWPGYTGRDC | | |
| | GTRACPGDCRGRGRCVDGRCVCNPGFTGEDCGSRRCPGDCR | | |
| | GHGLCEDGVCVCDAGYSGEDCSTRSCPGGCRGRGQCLDGRC | | |
| | VCEDGYSGEDCGVRQCPNDCSQHGVCQDGVCICWEGYVSED | | |
| | CSIRTCPSNCHGRGRCEEGRCLCDPGYTGPTCATRMCPADC | | |
| | RGRGRCVQGVCLCHVGYGGEDCGQEEPPASACPGGCGPREL | | |
| | CRAGQCVCVEGFRGPDCAIQTCPGDCRGRGECHDGSCVCKD | | |
| | GYAGEDCGEEVPTIEGMRMHLLEETTVRTEWTPAPGPVDAY | | |
| | EIQFIPTTEGASPPFTARVPSSASAYDQRGLAPGQEYQVTV | | |
| | RALRGTSWGLPASKTITTMIDGPQDLRVVAVTPTTLELGWL | | |
| | RPQAEVDRFVVSYVSAGNQRVRLEVPPEADGTLLTDLMPGV | | |
| | EYVVTVTAERGRAVSYPASVRANTGSSPLGLLGTTDEPPPS | | |
| | GPSTTQGAQAPLLQQRPQELGELRVLGRDETGRLRVVWTAQ | | |
| | PDTFAYFQLRMRVPEGPGAHEEVLPGDVRQALVPPPPPGTP | | |
| | YELSLHGVPPGGKPSDPIIYQGIMDKDEEKPGKSSGPPRLG | | |
| | ELTVTDRTSDSLLLRWTVPEGEFDSFVIQYKDRDGQPQVVP | | |
| | VEGPQRSAVITSLDPGRKYKFVLYGFVGKKRHGPLVAEAKI | | |
| | LPQSDPSPGTPPHLGNLWVTDPTPDSLHLSWTVPEGQFDTF | | |
| | MVQYRDRDGRPQVVPVEGPERSFVVSSLDPDHKYRFTLFGI | | |
| | ANKKRYGPLTADGTTAPERKEEPPRPEFLEQPLLGELTVTG | | |
| | VTPDSLRLSWTVAQGPFDSFMVQYKDAQGQPQAVPVAGDEN | | |
| | EVTVPGLDPDRKYKMNLYGLRGRQRVGPESVVAKTAPQEDV | | |
| | DETPSPTELGTEAPESPEEPLLGELTVTGSSPDSLSLFWTV | | |
| | PQGSFDSFTVQYKDRDGRPRAVRVGGKESEVTVGGLEPGHK | | |
| | YKMHLYGLHEGQRVGPVSAVGVTAPQQEETPPATESPLEPR | | |
| | LGELTVTDVTPNSVGLSWTVPEGQFDSFIVQYKDKDGQPQV | | |
| | VPVAADQREVTVYNLEPERKYKMNMYGLHDGQRMGPLSVVI | | |
| | VTAPLPPAPATEASKPPLEPRLGELTVTDITPDSVGLSWTV | | |
| | PEGEFDSFVVQYKDRDGQPQVVPVAADQREVTIPDLEPSRK | | |
| | YKFLLFGIQDGKRRSPVSVEAKTVARGDASPGAPPRLGELW | | |
| | VTDPTPDSLRLSWTVPEGQFDSFVVQFKDKDGPQVVPVEGH | | |
| | ERSVTVTPLDAGRKYRFLLYGLLGKKRHGPLTADGTTEARS | | |
| | AMDDTGTKRPPKPRLGEELQVTTVTQNSVGLSWTVPEGQFD | | |
| | SFVVQYKDRDGQPQVVPVEGSLREVSVPGLDPAHRYKLLLY | | |
| | GLHHGKRVGPISAVAITAGREETETETTAPTPPAPEPHLGE | | |
| | LTVEEATSHTLHLSWMVTEGEFDSFEIQYTDRDGQLQMVRI | | |
| | GGDRNDITLSGLESDHRYLVTLYGFSDGKHVGPVHVEALTV | | |
| | PEEEKPSEPPTATPEPPIKPRLGELTVTDATPDSLSLSWTV | | |
| | PEGQFDHFLVQYRNGDGQPKAVRVPGHEEGVTISGLEPDHK | | |
| | YKMNLYGFHGGQRMGPVSVVGVTAAEEETPSPTEPSMEAPE | | |
| | PAEEPLLGELTVTGSSPDSLSLSWTVPQGRFDSFTVQYKDR | | |
| | DGRPQVVRVGGEESEVTVGGLEPGRKYKMHLYGLHEGRRVG | | |
| | PVSAVGVTAPEEESPDAPLAKLRLGQMTVRDITSDSLSLSW | | |
| | TVPEGQFDHFLVQFKNGDGQPKAVRVPGHEDGVTISGLEPD | | |
| | HKYKMNLYGFHGGQRVGPVSAVGLTAPGKDEEMAPASTEPP | | |
| | TPEPPIKPRLEELTVTDATPDSLSLSWTVPEGQFDHFLVQY | | |
| | KNGDGQPKATRVPGHEDRVTISGLEPDNKYKMNLYGFHGGQ | | |
| | RVGPVSAIGVTAAEEETPSPTEPSMEAPEPPEEPLLGELTV | | |
| | TGSSPDSLSLSWTVPQGRFDSFTVQYKDRDGRPQVVRVGGE | | |
| | ESEVTVGGLEPGRKYKMHLYGLHEGRRVGPVSTVGVTAPQE | | |
| | DVDETPSPTEPGTEAPGPPEEPLLGELTVTGSSPDSLSLSW | | |
| | TVPQGRFDSFTVQYKDRDGRPQAVRVGGQESKVTVRGLEPG | | |
| | RKYKMHLYGLHEGRRLGPVSAVGVTEDEAETTQAVPTMTPE | | |
| | PPIKPRLGELTMTDATPDSLSLSWTVPEGQFDHFLVQYRNG | | |
| | DGQPKAVRVPGHEDGVTISGLEPDHKYKMNLYGFHGGQRVG | | |
| | PISVIGVTAAEEETPSPTELSTEAPEPPEEPLLGELTVTGS | | |
| | SPDSLSLSWTIPQGHFDSFTVQYKDRDGRPQVMRVRGEESE | | |
| | VTVGGLEPGRKYKMHLYGLHEGRRVGPVSTVGVTEDEAETT | | |
| | QAVPTTTPEPPNKPRLGELTVTDATPDSLSLSWMVPEGQFD | | |
| | HFLVQYRNGDGQPKVVRVPGHEDGVTISGLEPDHKYKMNLY | | |
| | GFHGGQRVGPISVIGVTAAEEETPAPTEPSTEAPEPPEEPL | | |
| | LGELTVTGSSPDSLSLSWTIPQGRFDSFTVQYKDRDGRPQV | | |
| | VRVRGEESEVTVGGLEPGCKYKMHLYGLHEGQRVGPVSAVG | | |
| | VTAPKDEAETTQAVPTMTPEPPIKPRLGELTVTDATPDSLS | | |
| | LSWMVPEGQFDHFLVQYRNGDGQPKAVRVPGHEDGVTISGL | | |
| | EPDHKYKMNLYGFHGGQRVGPVSAIGVTEEETPSPTEPSTE | | |
| | APEAPEEPLLGELTVTGSSPDSLSLSWTVPQGRFDSFTVQY | | |
| | KDRDGQPQVVRVRGEESEVTVGGLEPGRKYKMHLYGLHEGQ | | |
| | RVGPVSTVGITAPLPTPLPVEPRLGELAVAAVTSDSVGLSW | | |
| | TVAQGPFDSFLVQYRDAQGQPQAVPVSGDLRAVAVSGLDPA | | |
| | RKYKFLLFGLQNGKRHGPVPVEARTAPDTKPSPRLGELTVT | | |
| | DATPDSVGLSWTVPEGEFDSFVVQYKDKDGRLQVVPVAANQ | | |
| | REVTVQGLEPSRKYRFLLYGLSGRKRLGPISADSTTAPLEK | | |
| | ELPPHLGELTVAEETSSSLRLSWTVAQGPFDSFVVQYRDTD | | |
| | GQPRAVPVAADQRTVTVEDLEPGKKYKFLLYGLLGGKRLGP | | |
| | VSALGMTAPEEDTPAPELAPEAPEPPEEPRLGVLTVTDTTP | | |
| | DSMRLSWSVAQGPFDSFVVQYEDTNGQPQALLVDGDQSKIL | | |
| | ISGLEPSTPYRFLLYGLHEGKRLGPLSAEGTTGLAPAGQTS | | |
| | EESRPRLSQLSVTDVTTSSLRLNWEAPPGAFDSFLLRFGVP | | |
| | SPSTLEPHPRPLLQRELMVPGTRHSAVLRDLRSGTLYSLTL | | |
| | YGLRGPHKADSIQGTARTLSPVLESPRDLQFSEIRETSAKV | | |
| | NWMPPPSRADSFKVSYQLADGGEPQSVQVDGQARTQKLQGL | | |
| | IPGARYEVTVVSVRGFEESEPLTGFLTTVPDGPTQLRALNL | | |
| | TEGFAVLHWKPPQNPVDTYDVQVTAPGAPPLQAETPGSAVD | | |
| | YPLHDLVLHTNYTATVRGLRGPNLTSPASITFTTGLEAPRD | | |
| | LEAKEVTPRTALLTWTEPPVRPAGYLLSFHTPGGQNQEILL | | |
| | PGGITSHQLLGLFPSTSYNARLQAMWGQSLLPPVSTSFTTG | | |
| | GLRIPFPRDCGEEMQNGAGASRTSTIFLNGNRERPLNVFCD | | |
| | METDGGGWLVFQRRMDGQTDFWRDWEDYAHGFGNISGEFWL | | |
| | GNEALHSLTQAGDYSMRVDLRAGDEAVFAQYDSFHVDSAAE | | |
| | YYRLHLEGYHGTAGDSMSYHSGSVFSARDRDPNSLLISCAV | | |
| | SYRGAWWYRNCHYANLNGLYGSTVDHQGVSWYHWKGFEFSV | | |
| | PFTEMKLRPRNFRSPAGGG | | |
| TENX | MRLSWSVAQGPFDSFVVQYEDTNGQPQALLVDGDQSKILIS | P22105-2 | 20 |
| (isoform- | GLEPSTPYRFLLYGLHEGKRLGPLSAEGTTGLAPAGQTSEE | | |
| short) | SRPRLSQLSVTDVTTSSLRLNWEAPPGAFDSFLLRFGVPSP | | |
| | STLEPHPRPLLQRELMVPGTRHSAVLRDLRSGTLYSLTLYG | | |
| | LRGPHKADSIQGTARTLSPVLESPRDLQFSEIRETSAKVNW | | |
| | MPPPSRADSFKVSYQLADGGEPQSVQVDGQARTQKLQGLIP | | |
| | GARYEVTVVSVRGFEESEPLTGFLTTVPDGPTQLRALNLTE | | |
| | GFAVLHWKPPQNPVDTYDVQVTAPGAPPLQAETPGSAVDYP | | |
| | LHDLVLHTNYTATVRGLRGPNLTSPASITFTTGLEAPRDLE | | |
| | AKEVTPRTALLTWTEPPVRPAGYLLSFHTPGGQNQEILLPG | | |
| | GITSHQLLGLFPSTSYNARLQAMWGQSLLPPVSTSFTTGGL | | |
| | RIPFPRDCGEEMQNGAGASRTSTIFLNGNRERPLNVFCDME | | |
| | TDGGGWLVFQRRMDGQTDFWRDWEDYAHGFGNISGEFWLGN | | |
| | EALHSLTQAGDYSMRVDLRAGDEAVFAQYDSFHVDSAAEYY | | |
| | RLHLEGYHGTAGDSMSYHSGSVFSARDRDPNSLLISCAVSY | | |
| | RGAWWYRNCHYANLNGLYGSTVDHQGVSWYHWKGFEFSVPF | | |
| | TEMKLRPRNFRSPAGGG | | |
| TENX | MMPAQYALTSSLVLLVLLSTARAGPFSSRSNVTLPAPRPPP | P22105-3 | 21 |
| (isoform- | QPGGHTVGAGVGSPSSQLYEHTVEGGEKQVVFTHRINLPPS | | |
| isoform 4) | TGCGCPPGTEPPVLASEVQALRVRLEILEELVKGLKEQCTG | | |
| | GCCPASAQAGTGQTDVRTLCSLHGVFDLSRCTCSCEPGWGG | | |
| | PTCSDPTDAEIPPSSPPSASGSCPDDCNDQGRCVRGRCVCF | | |
| | PGYTGPSCGWPSCPGDCQGRGRCVQGVCVCRAGFSGPDCSQ | | |
| | RSCPRGCSQRGRCEGGRCVCDPGYTGDDCGMRSCPRGCSQR | | |
| | GRCENGRCVCNPGYTGEDCGVRSCPRGCSQRGRCKDGRCVC | | |
| | DPGYTGEDCGTRSCPWDCGEGGRCVDGRCVCWPGYTGEDCS | | |
| | TRTCPRDCRGRGRCEDGECICDTGYSGDDCGVRSCPGDCNQ | | |
| | RGRCEDGRCVCWPGYTGTDCGSRACPRDCRGRGRCENGVCV | | |
| | CNAGYSGEDCGVRSCPGDCRGRGRCESGRCMCWPGYTGRDC | | |
| | GTRACPGDCRGRGRCVDGRCVCNPGFTGEDCGSRRCPGDCR | | |
| | GHGLCEDGVCVCDAGYSGEDCSTRSCPGGCRGRGQCLDGRC | | |
| | VCEDGYSGEDCGVRQCPNDCSQHGVCQDGVCICWEGYVSED | | |
| | CSIRTCPSNCHGRGRCEEGRCLCDPGYTGPTCATRMCPADC | | |
| | RGRGRCVQGVCLCHVGYGGEDCGQEEPPASACPGGCGPREL | | |
| | CRAGQCVCVEGFRGPDCAIQTCPGDCRGRGECHDGSCVCKD | | |
| | GYAGEDCGEEVPTIEGMRMHLLEETTVRTEWTPAPGPVDAY | | |
| | EIQFIPTTEGASPPFTARVPSSASAYDQRGLAPGQEYQVTV | | |
| | RALRGTSWGLPASKTITTMIDGPQDLRVVAVTPTTLELGWL | | |
| | RPQAEVDRFVVSYVSAGNQRVRLEVPPEADGTLLTDLMPGV | | |
| | EYVVTVTAERGRAVSYPASVRANTGSSPLGLLGTTDEPPPS | | |
| | GPSTTQGAQAPLLQQRPQELGELRVLGRDETGRLRVVWTAQ | | |
| | PDTFAYFQLRMRVPEGPGAHEEVLPGDVRQALVPPPPPGTP | | |
| | YELSLHGVPPGGKPSDPIIYQGIMDKDEEKPGKSSGPPRLG | | |
| | ELTVTDRTSDSLLLRWTVPEGEFDSFVIQYKDRDGQPQVVP | | |
| | VEGPQRSAVITSLDPGRKYKFVLYGFVGKKRHGPLVAEAKI | | |
| | LPQSDPSPGTPPHLGNLWVTDPTPDSLHLSWTVPEGQFDTF | | |
| | MVQYRDRDGRPQVVPVEGPERSFVVSSLDPDHKYRFTLFGI | | |
| | ANKKRYGPLTADGTTAPERKEEPPRPEFLEQPLLGELTVTG | | |
| | VTPDSLRLSWTVAQGPFDSFMVQYKDAQGQPQAVPVAGDEN | | |
| | EVTVPGLDPDRKYKMNLYGLRGRQRVGPESVVAKTAPQEDV | | |
| | DETPSPTELGTEAPESPEEPLLGELTVTGSSPDSLSLFWTV | | |
| | PQGSFDSFTVQYKDRDGRPRAVRVGGKESEVTVGGLEPGHK | | |
| | YKMHLYGLHEGQRVGPVSAVGVTAPQQEETPPATESPLEPR | | |
| | LGELTVTDVTPNSVGLSWTVPEGQFDSFIVQYKDKDGQPQV | | |
| | VPVAADQREVTVYNLEPERKYKMNMYGLHDGQRMGPLSVVI | | |
| | VTAPLPPAPATEASKPPLEPRLGELTVTDITPDSVGLSWTV | | |
| | PEGEFDSFVVQYKDRDGQPQVVPVAADQREVTIPDLEPSRK | | |
| | YKFLLFGIQDGKRRSPVSVEAKTVARGDASPGAPPRLGELW | | |
| | VTDPTPDSLRLSWTVPEGQFDSFVVQFKDKDGPQVVPVEGH | | |
| | ERSVTVTPLDAGRKYRFLLYGLLGKKRHGPLTADGTTEARS | | |
| | AMDDTGTKRPPKPRLGEELQVTTVTQNSVGLSWTVPEGQFD | | |
| | SFVVQYKDRDGQPQVVPVEGSLREVSVPGLDPAHRYKLLLY | | |
| | GLHHGKRVGPISAVAITAGREETETETTAPTPPAPEPHLGE | | |
| | LTVEEATSHTLHLSWMVTEGEFDSFEIQYTDRDGQLQMVRI | | |
| | GGDRNDITLSGLESDHRYLVTLYGFSDGKHVGPVHVEALTV | | |
| | PEEEKPSEPPTATPEPPIKPRLGELTVTDATPDSLSLSWTV | | |
| | PEGQFDHFLVQYRNGDGQPKAVRVPGHEEGVTISGLEPDHK | | |
| | YKMNLYGFHGGQRMGPVSVVGVTAAEEETPSPTEPSMEAPE | | |
| | PAEEPLLGELTVTGSSPDSLSLSWTVPQGRFDSFTVQYKDR | | |
| | DGRPQVVRVGGEESEVTVGGLEPGRKYKMHLYGLHEGRRVG | | |
| | PVSAVGVTAPEEESPDAPLAKLRLGQMTVRDITSDSLSLSW | | |
| | TVPEGQFDHFLVQFKNGDGQPKAVRVPGHEDGVTISGLEPD | | |
| | HKYKMNLYGFHGGQRVGPVSAVGLTAPGKDEEMAPASTEPP | | |
| | TPEPPIKPRLEELTVTDATPDSLSLSWTVPEGQFDHFLVQY | | |
| | KNGDGQPKATRVPGHEDRVTISGLEPDNKYKMNLYGFHGGQ | | |
| | RVGPVSAIGVTAAEEETPSPTEPSMEAPEPPEEPLLGELTV | | |
| | TGSSPDSLSLSWTVPQGRFDSFTVQYKDRDGRPQVVRVGGE | | |
| | ESEVTVGGLEPGRKYKMHLYGLHEGRRVGPVSTVGVTAPQE | | |
| | DVDETPSPTEPGTEAPGPPEEPLLGELTVTGSSPDSLSLSW | | |
| | TVPQGRFDSFTVQYKDRDGRPQAVRVGGQESKVTVRGLEPG | | |
| | RKYKMHLYGLHEGRRLGPVSAVGVTEDEAETTQAVPTMTPE | | |
| | PPIKPRLGELTMTDATPDSLSLSWTVPEGQFDHFLVQYRNG | | |
| | DGQPKAVRVPGHEDGVTISGLEPDHKYKMNLYGFHGGQRVG | | |
| | PISVIGVTAAEEETPSPTELSTEAPEPPEEPLLGELTVTGS | | |
| | SPDSLSLSWTIPQGHFDSFTVQYKDRDGRPQVMRVRGEESE | | |
| | VTVGGLEPGRKYKMHLYGLHEGRRVGPVSTVGVTAPEDEAE | | |
| | TTQAVPTTTPEPPNKPRLGELTVTDATPDSLSLSWMVPEGQ | | |
| | FDHFLVQYRNGDGQPKVVRVPGHEDGVTISGLEPDHKYKMN | | |
| | LYGFHGGQRVGPISVIGVTAAEEETPAPTEPSTEAPEPPEE | | |
| | PLLGELTVTGSSPDSLSLSWTIPQGRFDSFTVQYKDRDGRP | | |
| | QVVRVRGEESEVTVGGLEPGCKYKMHLYGLHEGQRVGPVSA | | |
| | VGVTAPKDEAETTQAVPTMTPEPPIKPRLGELTVTDATPDS | | |
| | LSLSWMVPEGQFDHFLVQYRNGDGQPKAVRVPGHEDGVTIS | | |
| | GLEPDHKYKMNLYGFHGGQRVGPVSAIGVTEEETPSPTEPS | | |
| | TEAPEAPEEPLLGELTVTGSSPDSLSLSWTVPQGRFDSFTV | | |
| | QYKDRDGQPQVVRVRGEESEVTVGGLEPGRKYKMHLYGLHE | | |
| | GQRVGPVSTVGITAPLPTPLPVEPRLGELAVAAVTSDSVGL | | |
| | SWTVAQGPFDSFLVQYRDAQGQPQAVPVSGDLRAVAVSGLD | | |
| | PARKYKFLLFGLQNGKRHGPVPVEARTAPDTKPSPRLGELT | | |
| | VTDATPDSVGLSWTVPEGEFDSFVVQYKDKDGRLQVVPVAA | | |
| | NQREVTVQGLEPSRKYRFLLYGLSGRKRLGPISADSTTAPL | | |
| | EKELPPHLGELTVAEETSSSLRLSWTVAQGPFDSFVVQYRD | | |
| | TDGQPRAVPVAADQRTVTVEDLEPGKKYKFLLYGLLGGKRL | | |
| | GPVSALGMTAPEEDTPAPELAPEAPEPPEEPRLGVLTVTDT | | |
| | TPDSMRLSWSVAQGPFDSFVVQYEDTNGQPQALLVDGDQSK | | |
| | ILISGLEPSTPYRFLLYGLHEGKRLGPLSAEGTTGLAPAGQ | | |
| | TSEESRPRLSQLSVTDVTTSSLRLNWEAPPGAFDSFLLRFG | | |
| | VPSPSTLEPHPRPLLQRELMVPGTRHSAVLRDLRSGTLYSL | | |
| | TLYGLRGPHKADSIQGTARTLSPVLESPRDLQFSEIRETSA | | |
| | KVNWMPPPSRADSFKVSYQLADGGEPQSVQVDGQARTQKLQ | | |
| | GLIPGARYEVTVVSVRGFEESEPLTGFLTTVPDGPTQLRAL | | |
| | NLTEGFAVLHWKPPQNPVDTYDVQVTAPGAPPLQAETPGSA | | |
| | VDYPLHDLVLHTNYTATVRGLRGPNLTSPASITFTTGLEAP | | |
| | RDLEAKEVTPRTALLTWTEPPVRPAGYLLSFHTPGGQNQEI | | |
| | LLPGGITSHQLLGLFPSTSYNARLQAMWGQSLLPPVSTSFT | | |
| | TGGLRIPFPRDCGEEMQNGAGASRTSTIFLNGNRERPLNVF | | |
| | CDMETDGGGWLVFQRRMDGQTDFWRDWEDYAHGFGNISGEF | | |
| | WLGNEALHSLTQAGDYSMRVDLRAGDEAVFAQYDSFHVDSA | | |
| | AEYYRLHLEGYHGTAGDSMSYHSGSVFSARDRDPNSLLISC | | |
| | AVSYRGAWWYRNCHYANLNGLYGSTVDHQGVSWYHWKGFEF | | |
| | SVPFTEMKLRPRNFRSPAGGG | | |
| TENX | MMPAQYALTSSLVLLVLLSTARAGPFSSRSNVTLPAPRPPP | P22105-4 | 22 |
| (isoform- | QPGGHTVGAGVGSPSSQLYEHTVEGGEKQVVFTHRINLPPS | | |
| isoform 5) | TGCGCPPGTEPPVLASEVQALRVRLEILEELVKGLKEQCTG | | |
| | GCCPASAQAGTGEQGQTDVRTLCSLHGVFDLSRCTCSCEPG | | |
| | WGGPTCSDPTDAEIPPSSPPSASGSCPDDCNDQGRCVRGRC | | |
| | VCFPGYTGPSCGWPSCPGDCQGRGRCVQGVCVCRAGFSGPD | | |
| | CSQRSCPRGCSQRGRCEGGRCVCDPGYTGDDCGMRSCPRGC | | |
| | SQRGRCENGRCVCNPGYTGEDCGVRSCPRGCSQRGRCKDGR | | |
| | CVCDPGYTGEDCGTRSCPWDCGEGGRCVDGRCVCWPGYTGE | | |
| | DCSTRTCPRDCRGRGRCEDGECICDTGYSGDDCGVRSCPGD | | |
| | CNQRGRCEDGRCVCWPGYTGTDCGSRACPRDCRGRGRCENG | | |
| | VCVCNAGYSGEDCGVRSCPGDCRGRGRCESGRCMCWPGYTG | | |
| | RDCGTRACPGDCRGRGRCVDGRCVCNPGFTGEDCGSRRCPG | | |
| | DCRGHGLCEDGVCVCDAGYSGEDCSTRSCPGGCRGRGQCLD | | |
| | GRCVCEDGYSGEDCGVRQCPNDCSQHGVCQDGVCICWEGYV | | |
| | SEDCSIRTCPSNCHGRGRCEEGRCLCDPGYTGPTCATRMCP | | |
| | ADCRGRGRCVQGVCLCHVGYGGEDCGQEEPPASACPGGCGP | | |
| | RELCRAGQCVCVEGFRGPDCAIQTCPGDCRGRGECHDGSCV | | |
| | CKDGYAGEDCGEEVPTIEGMRMHLLEETTVRTEWTPAPGPV | | |
| | DAYEIQFIPTTEGASPPFTARVPSSASAYDQRGLAPGQEYQ | | |
| | VTVRALRGTSWGLPASKTITTMIDGPQDLRVVAVTPTTLEL | | |
| | GWLRPQAEVDRFVVSYVSAGNQRVRLEVPPEADGTLLTDLM | | |
| | PGVEYVVTVTAERGRAVSYPASVRANTGSSPLGLLGTTDEP | | |
| | PPSGPSTTQGAQAPLLQQRPQELGELRVLGRDETGRLRVVW | | |
| | TAQPDTFAYFQLRMRVPEGPGAHEEVLPGDVRQALVPPPPP | | |
| | GTPYELSLHGVPPGGKPSDPIIYQGIMDKDEEKPGKSSGPP | | |
| | RLGELTVTDRTSDSLLLRWTVPEGEFDSFVIQYKDRDGQPQ | | |
| | VVPVEGPQRSAVITSLDPGRKYKFVLYGFVGKKRHGPLVAE | | |
| | AKILPQSDPSPGTPPHLGNLWVTDPTPDSLHLSWTVPEGQF | | |
| | DTFMVQYRDRDGRPQVVPVEGPERSFVVSSLDPDHKYRFTL | | |
| | FGIANKKRYGPLTADGTTAPERKEEPPRPEFLEQPLLGELT | | |
| | VTGVTPDSLRLSWTVAQGPFDSFMVQYKDAQGQPQAVPVAG | | |
| | DENEVTVPGLDPDRKYKMNLYGLRGRQRVGPESVVAKTAPQ | | |
| | EDVDETPSPTELGTEAPESPEEPLLGELTVTGSSPDSLSLF | | |
| | WTVPQGSFDSFTVQYKDRDGRPRAVRVGGKESEVTVGGLEP | | |
| | GHKYKMHLYGLHEGQRVGPVSAVGVTAPQQEETPPATESPL | | |
| | EPRLGELTVTDVTPNSVGLSWTVPEGQFDSFIVQYKDKDGQ | | |
| | PQVVPVAADQREVTVYNLEPERKYKMNMYGLHDGQRMGPLS | | |
| | VVIVTAPLPPAPATEASKPPLEPRLGELTVTDITPDSVGLS | | |
| | WTVPEGEFDSFVVQYKDRDGQPQVVPVAADQREVTIPDLEP | | |
| | SRKYKFLLFGIQDGKRRSPVSVEAKTVARGDASPGAPPRLG | | |
| | ELWVTDPTPDSLRLSWTVPEGQFDSFVVQFKDKDGPQVVPV | | |
| | EGHERSVTVTPLDAGRKYRFLLYGLLGKKRHGPLTADGTTE | | |
| | ARSAMDDTGTKRPPKPRLGEELQVTTVTQNSVGLSWTVPEG | | |
| | QFDSFVVQYKDRDGQPQVVPVEGSLREVSVPGLDPAHRYKL | | |
| | LLYGLHHGKRVGPISAVAITAGREETETETTAPTPPAPEPH | | |
| | LGELTVEEATSHTLHLSWMVTEGEFDSFEIQYTDRDGQLQM | | |
| | VRIGGDRNDITLSGLESDHRYLVTLYGFSDGKHVGPVHVEA | | |
| | LTVPEEEKPSEPPTATPEPPIKPRLGELTVTDATPDSLSLS | | |
| | WTVPEGQFDHFLVQYRNGDGQPKAVRVPGHEEGVTISGLEP | | |
| | DHKYKMNLYGFHGGQRMGPVSVVGVTAAEEETPSPTEPSME | | |
| | APEPAEEPLLGELTVTGSSPDSLSLSWTVPQGRFDSFTVQY | | |
| | KDRDGRPQVVRVGGEESEVTVGGLEPGRKYKMHLYGLHEGR | | |
| | RVGPVSAVGVTAPEEESPDAPLAKLRLGQMTVRDITSDSLS | | |
| | LSWTVPEGQFDHFLVQFKNGDGQPKAVRVPGHEDGVTISGL | | |
| | EPDHKYKMNLYGFHGGQRVGPVSAVGLTAPGKDEEMAPAST | | |
| | EPPTPEPPIKPRLEELTVTDATPDSLSLSWTVPEGQFDHFL | | |
| | VQYKNGDGQPKATRVPGHEDRVTISGLEPDNKYKMNLYGFH | | |
| | GGQRVGPVSAIGVTAAEEETPSPTEPSMEAPEPPEEPLLGE | | |
| | LTVTGSSPDSLSLSWTVPQGRFDSFTVQYKDRDGRPQVVRV | | |
| | GGEESEVTVGGLEPGRKYKMHLYGLHEGRRVGPVSTVGVTA | | |
| | PQEDVDETPSPTEPGTEAPGPPEEPLLGELTVTGSSPDSLS | | |
| | LSWTVPQGRFDSFTVQYKDRDGRPQAVRVGGQESKVTVRGL | | |
| | EPGRKYKMHLYGLHEGRRLGPVSAVGVTEDEAETTQAVPTM | | |
| | TPEPPIKPRLGELTMTDATPDSLSLSWTVPEGQFDHFLVQY | | |
| | RNGDGQPKAVRVPGHEDGVTISGLEPDHKYKMNLYGFHGGQ | | |
| | RVGPISVIGVTAAEEETPSPTELSTEAPEPPEEPLLGELTV | | |
| | TGSSPDSLSLSWTIPQGHFDSFTVQYKDRDGRPQVMRVRGE | | |
| | ESEVTVGGLEPGRKYKMHLYGLHEGRRVGPVSTVGVTEDEA | | |
| | ETTQAVPTTTPEPPNKPRLGELTVTDATPDSLSLSWMVPEG | | |
| | QFDHFLVQYRNGDGQPKVVRVPGHEDGVTISGLEPDHKYKM | | |
| | NLYGFHGGQRVGPISVIGVTAAEEETPAPTEPSTEAPEPPE | | |
| | EPLLGELTVTGSSPDSLSLSWTIPQGRFDSFTVQYKDRDGR | | |
| | PQVVRVRGEESEVTVGGLEPGCKYKMHLYGLHEGQRVGPVS | | |
| | AVGVTAPKDEAETTQAVPTMTPEPPIKPRLGELTVTDATPD | | |
| | SLSLSWMVPEGQFDHFLVQYRNGDGQPKAVRVPGHEDGVTI | | |
| | SGLEPDHKYKMNLYGFHGGQRVGPVSAIGVTEEETPSPTEP | | |
| | STEAPEAPEEPLLGELTVTGSSPDSLSLSWTVPQGRFDSFT | | |
| | VQYKDRDGQPQVVRVRGEESEVTVGGLEPGRKYKMHLYGLH | | |
| | EGQRVGPVSTVGITAPLPTPLPVEPRLGELAVAAVTSDSVG | | |
| | LSWTVAQGPFDSFLVQYRDAQGQPQAVPVSGDLRAVAVSGL | | |
| | DPARKYKFLLFGLQNGKRHGPVPVEARTAPDTKPSPRLGEL | | |
| | TVTDATPDSVGLSWTVPEGEFDSFVVQYKDKDGRLQVVPVA | | |
| | ANQREVTVQGLEPSRKYRFLLYGLSGRKRLGPISADSTTAP | | |
| | LEKELPPHLGELTVAEETSSSLRLSWTVAQGPFDSFVVQYR | | |
| | DTDGQPRAVPVAADQRTVTVEDLEPGKKYKFLLYGLLGGKR | | |
| | LGPVSALGMTAPEEDTPAPELAPEAPEPPEEPRLGVLTVTD | | |
| | TTPDSMRLSWSVAQGPFDSFVVQYEDTNGQPQALLVDGDQS | | |
| | KILISGLEPSTPYRFLLYGLHEGKRLGPLSAEGTTGLAPAG | | |
| | QTSEESRPRLSQLSVTDVTTSSLRLNWEAPPGAFDSFLLRF | | |
| | GVPSPSTLEPHPRPLLQRELMVPGTRHSAVLRDLRSGTLYS | | |
| | LTLYGLRGPHKADSIQGTARTLSPVLESPRDLQFSEIRETS | | |
| | AKVNWMPPPSRADSFKVSYQLADGGEPQSVQVDGQARTQKL | | |
| | QGLIPGARYEVTVVSVRGFEESEPLTGFLTTVPDGPTQLRA | | |
| | LNLTEGFAVLHWKPPQNPVDTYDVQVTAPGAPPLQAETPGS | | |
| | AVDYPLHDLVLHTNYTATVRGLRGPNLTSPASITFTTGLEA | | |
| | PRDLEAKEVTPRTALLTWTEPPVRPAGYLLSFHTPGGQNQE | | |
| | ILLPGGITSHQLLGLFPSTSYNARLQAMWGQSLLPPVSTSF | | |
| | TTGGLRIPFPRDCGEEMQNGAGASRTSTIFLNGNRERPLNV | | |
| | FCDMETDGGGWLVFQRRMDGQTDFWRDWEDYAHGFGNISGE | | |
| | FWLGNEALHSLTQAGDYSMRVDLRAGDEAVFAQYDSFHVDS | | |
| | AAEYYRLHLEGYHGTAGDSMSYHSGSVFSARDRDPNSLLIS | | |
| | CAVSYRGAWWYRNCHYANLNGLYGSTVDHQGVSWYHWKGFE | | |
| | FSVPFTEMKLRPRNFRSPAGGG | | |
| KIT(Isoform- | MRGARGAWDFLCVLLLLLRVQTGSSQPSVSPGEPSPPSIHP | P10721-1 | 23 |
| 1) | GKSDLIVRVGDEIRLLCTDPGFVKWTFEILDETNENKQNEW | | |
| | ITEKAEATNTGKYTCTNKHGLSNSIYVFVRDPAKLFLVDRS | | |
| | LYGKEDNDTLVRCPLTDPEVTNYSLKGCQGKPLPKDLRFIP | | |
| | DPKAGIMIKSVKRAYHRLCLHCSVDQEGKSVLSEKFILKVR | | |
| | PAFKAVPVVSVSKASYLLREGEEFTVTCTIKDVSSSVYSTW | | |
| | KRENSQTKLQEKYNSWHHGDFNYERQATLTISSARVNDSGV | | |
| | FMCYANNTFGSANVTTTLEVVDKGFINIFPMINTTVFVNDG | | |
| | ENVDLIVEYEAFPKPEHQQWIYMNRTFTDKWEDYPKSENES | | |
| | NIRYVSELHLTRLKGTEGGTYTFLVSNSDVNAAIAFNVYVN | | |
| | TKPEILTYDRLVNGMLQCVAAGFPEPTIDWYFCPGTEQRCS | | |
| | ASVLPVDVQTLNSSGPPFGKLVVQSSIDSSAFKHNGTVECK | | |
| | AYNDVGKTSAYFNFAFKGNNKEQIHPHTLFTPLLIGFVIVA | | |
| | GMMCIIVMILTYKYLQKPMYEVQWKVVEEINGNNYVYIDPT | | |
| | QLPYDHKWEFPRNRLSFGKTLGAGAFGKVVEATAYGLIKSD | | |
| | AAMTVAVKMLKPSAHLTEREALMSELKVLSYLGNHMNIVNL | | |
| | LGACTIGGPTLVITEYCCYGDLLNFLRRKRDSFICSKQEDH | | |
| | AEAALYKNLLHSKESSCSDSTNEYMDMKPGVSYVVPTKADK | | |
| | RRSVRIGSYIERDVTPAIMEDDELALDLEDLLSFSYQVAKG | | |
| | MAFLASKNCIHRDLAARNILLTHGRITKICDFGLARDIKND | | |
| | SNYVVKGNARLPVKWMAPESIFNCVYTFESDVWSYGIFLWE | | |
| | LFSLGSSPYPGMPVDSKFYKMIKEGFRMLSPEHAPAEMYDI | | |
| | MKTCWDADPLKRPTFKQIVQLIEKQISESTNHIYSNLANCS | | |
| | PNRQKPVVDHSVRINSVGSTASSSQPLLVHDDV | | |
| KIT(Isoform- | MRGARGAWDFLCVLLLLLRVQTGSSQPSVSPGEPSPPSIHP | P10721-2 | 24 |
| 2) | GKSDLIVRVGDEIRLLCTDPGFVKWTFEILDETNENKQNEW | | |
| | ITEKAEATNTGKYTCTNKHGLSNSIYVFVRDPAKLFLVDRS | | |
| | LYGKEDNDTLVRCPLTDPEVTNYSLKGCQGKPLPKDLRFIP | | |
| | DPKAGIMIKSVKRAYHRLCLHCSVDQEGKSVLSEKFILKVR | | |
| | PAFKAVPVVSVSKASYLLREGEEFTVTCTIKDVSSSVYSTW | | |
| | KRENSQTKLQEKYNSWHHGDFNYERQATLTISSARVNDSGV | | |
| | FMCYANNTFGSANVTTTLEVVDKGFINIFPMINTTVFVNDG | | |
| | ENVDLIVEYEAFPKPEHQQWIYMNRTFTDKWEDYPKSENES | | |
| | NIRYVSELHLTRLKGTEGGTYTFLVSNSDVNAAIAFNVYVN | | |
| | TKPEILTYDRLVNGMLQCVAAGFPEPTIDWYFCPGTEQRCS | | |
| | ASVLPVDVQTLNSSGPPFGKLVVQSSIDSSAFKHNGTVECK | | |
| | AYNDVGKTSAYFNFAFKEQIHPHTLFTPLLIGFVIVAGMMC | | |
| | IIVMILTYKYLQKPMYEVQWKVVEEINGNNYVYIDPTQLPY | | |
| | DHKWEFPRNRLSFGKTLGAGAFGKVVEATAYGLIKSDAAMT | | |
| | VAVKMLKPSAHLTEREALMSELKVLSYLGNHMNIVNLLGAC | | |
| | TIGGPTLVITEYCCYGDLLNFLRRKRDSFICSKQEDHAEAA | | |
| | LYKNLLHSKESSCSDSTNEYMDMKPGVSYVVPTKADKRRSV | | |
| | RIGSYIERDVTPAIMEDDELALDLEDLLSFSYQVAKGMAFL | | |
| | ASKNCIHRDLAARNILLTHGRITKICDFGLARDIKNDSNYV | | |
| | VKGNARLPVKWMAPESIFNCVYTFESDVWSYGIFLWELFSL | | |
| | GSSPYPGMPVDSKFYKMIKEGFRMLSPEHAPAEMYDIMKTC | | |
| | WDADPLKRPTFKQIVQLIEKQISESTNHIYSNLANCSPNRQ | | |
| | KPVVDHSVRINSVGSTASSSQPLLVHDDV | | |
| KIT(Isoform- | MRGARGAWDFLCVLLLLLRVQTGSSQPSVSPGEPSPPSIHP | P10721-3 | 25 |
| 3) | GKSDLIVRVGDEIRLLCTDPGFVKWTFEILDETNENKQNEW | | |
| | ITEKAEATNTGKYTCTNKHGLSNSIYVFVRDPAKLFLVDRS | | |
| | LYGKEDNDTLVRCPLTDPEVTNYSLKGCQGKPLPKDLRFIP | | |
| | DPKAGIMIKSVKRAYHRLCLHCSVDQEGKSVLSEKFILKVR | | |
| | PAFKAVPVVSVSKASYLLREGEEFTVTCTIKDVSSSVYSTW | | |
| | KRENSQTKLQEKYNSWHHGDFNYERQATLTISSARVNDSGV | | |
| | FMCYANNTFGSANVTTTLEVVDKGFINIFPMINTTVFVNDG | | |
| | ENVDLIVEYEAFPKPEHQQWIYMNRTFTDKWEDYPKSENES | | |
| | NIRYVSELHLTRLKGTEGGTYTFLVSNSDVNAAIAFNVYVN | | |
| | TSI | | |
| GGH | MASPGCLLCVLGLLLCGAASLELSRPHGDTAKKPIIGILMQ | Q92820-1 | 26 |
| | KCRNKVMKNYGRYYIAASYVKYLESAGARVVPVRLDLTEKD | | |
| | YEILFKSINGILFPGGSVDLRRSDYAKVAKIFYNLSIQSFD | | |
| | DGDYFPVWGTCLGFEELSLLISGECLLTATDTVDVAMPLNF | | |
| | TGGQLHSRMFQNFPTELLLSLAVEPLTANFHKWSLSVKNFT | | |
| | MNEKLKKFFNVLTTNTDGKIEFISTMEGYKYPVYGVQWHPE | | |
| | KAPYEWKNLDGISHAPNAVKTAFYLAEFFVNEARKNNHHFK | | |
| | SESEEEKALIYQFSPIYTGNISSFQQCYIFD | | |
| S10A6 | MACPLDQAIGLLVAIFHKYSGREGDKHTLSKKELKELIQKE | P06703-1 | 27 |
| | LTIGSKLQDAEIARLMEDLDRNKDQEVNFQEYVTFLGALAL | | |
| | IYNEALKG | | |
| CD14 | MERASCLLLLLLPLVHVSATTPEPCELDDEDFRCVCNFSEP | P08571 | 28 |
| | QPDWSEAFQCVSAVEVEIHAGGLNLEPFLKRVDADADPRQY | | |
| | ADTVKALRVRRLTVGAAQVPAQLLVGALRVLAYSRLKELTL | | |
| | EDLKITGTMPPLPLEATGLALSSLRLRNVSWATGRSWLAEL | | |
| | QQWLKPGLKVLSIAQAHSPAFSCEQVRAFPALTSLDLSDNP | | |
| | GLGERGLMAALCPHKFPAIQNLALRNTGMETPTGVCAALAA | | |
| | AGVQPHSLDLSHNSLRATVNPSAPRCMWSSALNSLNLSFAG | | |
| | LEQVPKGLPAKLRVLDLSCNRLNRAPQPDELPEVDNLTLDG | | |
| | NPFLVPGTALPHEGSMNSGVVPACARSTLSVGVSGTLVLLQ | | |
| | GARGFA | | |
| PEDF | MQALVLLLCIGALLGHSSCQNPASPPEEGSPDPDSTGALVE | P36955 | 29 |
| | EEDPFFKVPVNKLAAAVSNFGYDLYRVRSSTSPTTNVLLSP | | |
| | LSVATALSALSLGAEQRTESIIHRALYYDLISSPDIHGTYK | | |
| | ELLDTVTAPQKNLKSASRIVFEKKLRIKSSFVAPLEKSYGT | | |
| | RPRVLTGNPRLDLQEINNWVQAQMKGKLARSTKEIPDEISI | | |
| | LLLGVAHFKGQWVTKFDSRKTSLEDFYLDEERTVRVPMMSD | | |
| | PKAVLRYGLDSDLSCKIAQLPLTGSMSIIFFLPLKVTQNLT | | |
| | LIEESLTSEFIHDIDRELKTVQAVLTVPKLKLSYEGEVTKS | | |
| | LQEMKLQSLFDSPDFSKITGKPIKLTQVEHRAGFEWNEDGA | | |
| | GTTPSPGLQPAHLTFPLDYHLNQPFIFVLRDTDTGALLFIG | | |
| | KILDPRGP | | |
| MASP | MDALQLANSAFAVDLFKQLCEKEPLGNVLFSPICLSTSLSL | P36952 | 30 |
| (isoform-1) | AQVGAKGDTANEIGQVLHFENVKDVPFGFQTVTSDVNKLSS | | |
| | FYSLKLIKRLYVDKSLNLSTEFISSTKRPYAKELETVDFKD | | |
| | KLEETKGQINNSIKDLTDGHFENILADNSVNDQTKILVVNA | | |
| | AYFVGKWMKKFSESETKECPFRVNKTDTKPVQMMNMEATFC | | |
| | MGNIDSINCKIIELPFQNKHLSMFILLPKDVEDESTGLEKI | | |
| | EKQLNSESLSQWTNPSTMANAKVKLSIPKFKVEKMIDPKAC | | |
| | LENLGLKHIFSEDTSDFSGMSETKGVALSNVIHKVCLEITE | | |
| | DGGDSIEVPGARILQHKDELNADHPFIYIIRHNKTRNIIFF | | |
| | GKFCSP | | |
| MASP | MDALQLANSAFAVDLFKQLCEKEPLGNVLFSPICLSTSLSL | P36952-2 | 31 |
| (isoform-2) | AQVGAKGDTANEIGQVLHFENVKDVPFGFQTVTSDVNKLSS | | |
| | FYSLKLIKRLYVDKSLNLSTEFISSTKRPYAKELETVDFKD | | |
| | KLEETKGQINNSIKDLTDGHFENILADNSVNDQTKILVVNA | | |
| | AYFVGKWMKKFSESETKECPFRVNKVCGAACSSKRSPIIDV | | |
| | KNDRDRVGHKSIPMRNLRARPAKCLS | | |
| GELS | MAPHRPAPALLCALSLALCALSLPVRAATASRGASQAGAPQ | P06396 | 32 |
| (isoform-1) | GRVPEARPNSMVVEHPEFLKAGKEPGLQIWRVEKFDLVPVP | | |
| | TNLYGDFFTGDAYVILKTVQLRNGNLQYDLHYWLGNECSQD | | |
| | ESGAAAIFTVQLDDYLNGRAVQHREVQGFESATFLGYFKSG | | |
| | LKYKKGGVASGFKHVVPNEVVVQRLFQVKGRRVVRATEVPV | | |
| | SWESFNNGDCFILDLGNNIHQWCGSNSNRYERLKATQVSKG | | |
| | IRDNERSGRARVHVSEEGTEPEAMLQVLGPKPALPAGTEDT | | |
| | AKEDAANRKLAKLYKVSNGAGTMSVSLVADENPFAQGALKS | | |
| | EDCFILDHGKDGKIFVWKGKQANTEERKAALKTASDFITKM | | |
| | DYPKQTQVSVLPEGGETPLFKQFFKNWRDPDQTDGLGLSYL | | |
| | SSHIANVERVPFDAATLHTSTAMAAQHGMDDDGTGQKQIWR | | |
| | IEGSNKVPVDPATYGQFYGGDSYIILYNYRHGGRQGQIIYN | | |
| | WQGAQSTQDEVAASAILTAQLDEELGGTPVQSRVVQGKEPA | | |
| | HLMSLFGGKPMIIYKGGTSREGGQTAPASTRLFQVRANSAG | | |
| | ATRAVEVLPKAGALNSNDAFVLKTPSAAYLWVGTGASEAEK | | |
| | TGAQELLRVLRAQPVQVAEGSEPDGFWEALGGKAAYRTSPR | | |
| | LKDKKMDAHPPRLFACSNKIGRFVIEEVPGELMQEDLATDD | | |
| | VMLLDTWDQVFVWVGKDSQEEEKTEALTSAKRYIETDPANR | | |
| | DRRTPITVVKQGFEPPSFVGWFLGWDDDYWSVDPLDRAMAE | | |
| | LAA | | |
| GELS | MVVEHPEFLKAGKEPGLQIWRVEKFDLVPVPTNLYGDFFTG | P06396-2 | 33 |
| (isoform-2) | DAYVILKTVQLRNGNLQYDLHYWLGNECSQDESGAAAIFTV | | |
| | QLDDYLNGRAVQHREVQGFESATFLGYFKSGLKYKKGGVAS | | |
| | GFKHVVPNEVVVQRLFQVKGRRVVRATEVPVSWESFNNGDC | | |
| | FILDLGNNIHQWCGSNSNRYERLKATQVSKGIRDNERSGRA | | |
| | RVHVSEEGTEPEAMLQVLGPKPALPAGTEDTAKEDAANRKL | | |
| | AKLYKVSNGAGTMSVSLVADENPFAQGALKSEDCFILDHGK | | |
| | DGKIFVWKGKQANTEERKAALKTASDFITKMDYPKQTQVSV | | |
| | LPEGGETPLFKQFFKNWRDPDQTDGLGLSYLSSHIANVERV | | |
| | PFDAATLHTSTAMAAQHGMDDDGTGQKQIWRIEGSNKVPVD | | |
| | PATYGQFYGGDSYIILYNYRHGGRQGQIIYNWQGAQSTQDE | | |
| | VAASAILTAQLDEELGGTPVQSRVVQGKEPAHLMSLFGGKP | | |
| | MIIYKGGTSREGGQTAPASTRLFQVRANSAGATRAVEVLPK | | |
| | AGALNSNDAFVLKTPSAAYLWVGTGASEAEKTGAQELLRVL | | |
| | RAQPVQVAEGSEPDGFWEALGGKAAYRTSPRLKDKKMDAHP | | |
| | PRLFACSNKIGRFVIEEVPGELMQEDLATDDVMLLDTWDQV | | |
| | FVWVGKDSQEEEKTEALTSAKRYIETDPANRDRRTPITVVK | | |
| | QGFEPPSFVGWFLGWDDDYWSVDPLDRAMAELAA | | |
| GELS | MEKLFCCFPNSMVVEHPEFLKAGKEPGLQIWRVEKFDLVPV | P06396-3 | 34 |
| (isoform-3) | PTNLYGDFFTGDAYVILKTVQLRNGNLQYDLHYWLGNECSQ | | |
| | DESGAAAIFTVQLDDYLNGRAVQHREVQGFESATFLGYFKS | | |
| | GLKYKKGGVASGFKHVVPNEVVVQRLFQVKGRRVVRATEVP | | |
| | VSWESFNNGDCFILDLGNNIHQWCGSNSNRYERLKATQVSK | | |
| | GIRDNERSGRARVHVSEEGTEPEAMLQVLGPKPALPAGTED | | |
| | TAKEDAANRKLAKLYKVSNGAGTMSVSLVADENPFAQGALK | | |
| | SEDCFILDHGKDGKIFVWKGKQANTEERKAALKTASDFITK | | |
| | MDYPKQTQVSVLPEGGETPLFKQFFKNWRDPDQTDGLGLSY | | |
| | LSSHIANVERVPFDAATLHTSTAMAAQHGMDDDGTGQKQIW | | |
| | RIEGSNKVPVDPATYGQFYGGDSYIILYNYRHGGRQGQIIY | | |
| | NWQGAQSTQDEVAASAILTAQLDEELGGTPVQSRVVQGKEP | | |
| | AHLMSLFGGKPMIIYKGGTSREGGQTAPASTRLFQVRANSA | | |
| | GATRAVEVLPKAGALNSNDAFVLKTPSAAYLWVGTGASEAE | | |
| | KTGAQELLRVLRAQPVQVAEGSEPDGFWEALGGKAAYRTSP | | |
| | RLKDKKMDAHPPRLFACSNKIGRFVIEEVPGELMQEDLATD | | |
| | DVMLLDTWDQVFVWVGKDSQEEEKTEALTSAKRYIETDPAN | | |
| | RDRRTPITVVKQGFEPPSFVGWFLGWDDDYWSVDPLDRAMA | | |
| | ELAA | | |
| GELS | MPLCTPNSMVVEHPEFLKAGKEPGLQIWRVEKFDLVPVPTN | P06396-4 | 35 |
| (isoform-4) | LYGDFFTGDAYVILKTVQLRNGNLQYDLHYWLGNECSQDES | | |
| | GAAAIFTVQLDDYLNGRAVQHREVQGFESATFLGYFKSGLK | | |
| | YKKGGVASGFKHVVPNEVVVQRLFQVKGRRVVRATEVPVSW | | |
| | ESFNNGDCFILDLGNNIHQWCGSNSNRYERLKATQVSKGIR | | |
| | DNERSGRARVHVSEEGTEPEAMLQVLGPKPALPAGTEDTAK | | |
| | EDAANRKLAKLYKVSNGAGTMSVSLVADENPFAQGALKSED | | |
| | CFILDHGKDGKIFVWKGKQANTEERKAALKTASDFITKMDY | | |
| | PKQTQVSVLPEGGETPLFKQFFKNWRDPDQTDGLGLSYLSS | | |
| | HIANVERVPFDAATLHTSTAMAAQHGMDDDGTGQKQIWRIE | | |
| | GSNKVPVDPATYGQFYGGDSYIILYNYRHGGRQGQIIYNWQ | | |
| | GAQSTQDEVAASAILTAQLDEELGGTPVQSRVVQGKEPAHL | | |
| | MSLFGGKPMIIYKGGTSREGGQTAPASTRLFQVRANSAGAT | | |
| | RAVEVLPKAGALNSNDAFVLKTPSAAYLWVGTGASEAEKTG | | |
| | AQELLRVLRAQPVQVAEGSEPDGFWEALGGKAAYRTSPRLK | | |
| | DKKMDAHPPRLFACSNKIGRFVIEEVPGELMQEDLATDDVM | | |
| | LLDTWDQVFVWVGKDSQEEEKTEALTSAKRYIETDPANRDR | | |
| | RTPITVVKQGFEPPSFVGWFLGWDDDYWSVDPLDRAMAELA | | |
| | A | | |
| LUM | MSLSAFTLFLALIGGTSGQYYDYDFPLSIYGQSSPNCAPEC | P51884 | 36 |
| | NCPESYPSAMYCDELKLKSVPMVPPGIKYLYLRNNQIDHID | | |
| | EKAFENVTDLQWLILDHNLLENSKIKGRVFSKLKQLKKLHI | | |
| | NHNNLTESVGPLPKSLEDLQLTHNKITKLGSFEGLVNLTFI | | |
| | HLQHNRLKEDAVSAAFKGLKSLEYLDLSFNQIARLPSGLPV | | |
| | SLLTLYLDNNKISNIPDEYFKRFNALQYLRLSHNELADSGI | | |
| | PGNSFNVSSLVELDLSYNKLKNIPTVNENLENYYLEVNQLE | | |
| | KFDIKSFCKILGPLSYSKIKHLRLDGNRISETSLPPDMYEC | | |
| | LRVANEVTLN | | |
| C163A | MSKLRMVLLEDSGSADFRRHFVNLSPFTITVVLLLSACFVT | Q86VB7- | 37 |
| (isoform-1) | SSLGGTDKELRLVDGENKCSGRVEVKVQEEWGTVCNNGWSM | 1 | |
| | EAVSVICNQLGCPTAIKAPGWANSSAGSGRIWMDHVSCRGN | | |
| | ESALWDCKHDGWGKHSNCTHQQDAGVTCSDGSNLEMRLTRG | | |
| | GNMCSGRIEIKFQGRWGTVCDDNFNIDHASVICRQLECGSA | | |
| | VSFSGSSNFGEGSGPIWFDDLICNGNESALWNCKHQGWGKH | | |
| | NCDHAEDAGVICSKGADLSLRLVDGVTECSGRLEVRFQGEW | | |
| | GTICDDGWDSYDAAVACKQLGCPTAVTAIGRVNASKGFGHI | | |
| | WLDSVSCQGHEPAIWQCKHHEWGKHYCNHNEDAGVTCSDGS | | |
| | DLELRLRGGGSRCAGTVEVEIQRLLGKVCDRGWGLKEADVV | | |
| | CRQLGCGSALKTSYQVYSKIQATNTWLFLSSCNGNETSLWD | | |
| | CKNWQWGGLTCDHYEEAKITCSAHREPRLVGGDIPCSGRVE | | |
| | VKHGDTWGSICDSDFSLEAASVLCRELQCGTVVSILGGAHF | | |
| | GEGNGQIWAEEFQCEGHESHLSLCPVAPRPEGTCSHSRDVG | | |
| | VVCSRYTEIRLVNGKTPCEGRVELKTLGAWGSLCNSHWDIE | | |
| | DAHVLCQQLKCGVALSTPGGARFGKGNGQIWRHMFHCTGTE | | |
| | QHMGDCPVTALGASLCPSEQVASVICSGNQSQTLSSCNSSS | | |
| | LGPTRPTIPEESAVACIESGQLRLVNGGGRCAGRVEIYHEG | | |
| | SWGTICDDSWDLSDAHVVCRQLGCGEAINATGSAHFGEGTG | | |
| | PIWLDEMKCNGKESRIWQCHSHGWGQQNCRHKEDAGVICSE | | |
| | FMSLRLTSEASREACAGRLEVFYNGAWGTVGKSSMSETTVG | | |
| | VVCRQLGCADKGKINPASLDKAMSIPMWVDNVQCPKGPDTL | | |
| | WQCPSSPWEKRLASPSEETWITCDNKIRLQEGPTSCSGRVE | | |
| | IWHGGSWGTVCDDSWDLDDAQVVCQQLGCGPALKAFKEAEF | | |
| | GQGTGPIWLNEVKCKGNESSLWDCPARRWGHSECGHKEDAA | | |
| | VNCTDISVQKTPQKATTGRSSRQSSFIAVGILGVVLLAIFV | | |
| | ALFFLTKKRRQRQRLAVSSRGENLVHQIQYREMNSCLNADD | | |
| | LDLMNSSENSHESADFSAAELISVSKFLPISGMEKEAILSH | | |
| | TEKENGNL | | |
| C163A | MSKLRMVLLEDSGSADFRRHFVNLSPFTITVVLLLSACFVT | Q86VB7- | 38 |
| (isoform-2) | SSLGGTDKELRLVDGENKCSGRVEVKVQEEWGTVCNNGWSM | 2 | |
| | EAVSVICNQLGCPTAIKAPGWANSSAGSGRIWMDHVSCRGN | | |
| | ESALWDCKHDGWGKHSNCTHQQDAGVTCSDGSNLEMRLTRG | | |
| | GNMCSGRIEIKFQGRWGTVCDDNFNIDHASVICRQLECGSA | | |
| | VSFSGSSNFGEGSGPIWFDDLICNGNESALWNCKHQGWGKH | | |
| | NCDHAEDAGVICSKGADLSLRLVDGVTECSGRLEVRFQGEW | | |
| | GTICDDGWDSYDAAVACKQLGCPTAVTAIGRVNASKGFGHI | | |
| | WLDSVSCQGHEPAIWQCKHHEWGKHYCNHNEDAGVTCSDGS | | |
| | DLELRLRGGGSRCAGTVEVEIQRLLGKVCDRGWGLKEADVV | | |
| | CRQLGCGSALKTSYQVYSKIQATNTWLFLSSCNGNETSLWD | | |
| | CKNWQWGGLTCDHYEEAKITCSAHREPRLVGGDIPCSGRVE | | |
| | VKHGDTWGSICDSDFSLEAASVLCRELQCGTVVSILGGAHF | | |
| | GEGNGQIWAEEFQCEGHESHLSLCPVAPRPEGTCSHSRDVG | | |
| | VVCSRYTEIRLVNGKTPCEGRVELKTLGAWGSLCNSHWDIE | | |
| | DAHVLCQQLKCGVALSTPGGARFGKGNGQIWRHMFHCTGTE | | |
| | QHMGDCPVTALGASLCPSEQVASVICSGNQSQTLSSCNSSS | | |
| | LGPTRPTIPEESAVACIESGQLRLVNGGGRCAGRVEIYHEG | | |
| | SWGTICDDSWDLSDAHVVCRQLGCGEAINATGSAHFGEGTG | | |
| | PIWLDEMKCNGKESRIWQCHSHGWGQQNCRHKEDAGVICSE | | |
| | FMSLRLTSEASREACAGRLEVFYNGAWGTVGKSSMSETTVG | | |
| | VVCRQLGCADKGKINPASLDKAMSIPMWVDNVQCPKGPDTL | | |
| | WQCPSSPWEKRLASPSEETWITCDNKIRLQEGPTSCSGRVE | | |
| | IWHGGSWGTVCDDSWDLDDAQVVCQQLGCGPALKAFKEAEF | | |
| | GQGTGPIWLNEVKCKGNESSLWDCPARRWGHSECGHKEDAA | | |
| | VNCTDISVQKTPQKATTGRSSRQSSFIAVGILGVVLLAIFV | | |
| | ALFFLTKKRRQRQRLAVSSRGENLVHQIQYREMNSCLNADD | | |
| | LDLMNSSGLWVLGGSIAQGFRSVAAVEAQTFYFDKQLKKSK | | |
| | NVIGSLDAYNGQE | | |
| C163A | MSKLRMVLLEDSGSADFRRHFVNLSPFTITVVLLLSACFVT | Q86VB7- | 39 |
| (isoform-3) | SSLGGTDKELRLVDGENKCSGRVEVKVQEEWGTVCNNGWSM | 3 | |
| | EAVSVICNQLGCPTAIKAPGWANSSAGSGRIWMDHVSCRGN | | |
| | ESALWDCKHDGWGKHSNCTHQQDAGVTCSDGSNLEMRLTRG | | |
| | GNMCSGRIEIKFQGRWGTVCDDNFNIDHASVICRQLECGSA | | |
| | VSFSGSSNFGEGSGPIWFDDLICNGNESALWNCKHQGWGKH | | |
| | NCDHAEDAGVICSKGADLSLRLVDGVTECSGRLEVRFQGEW | | |
| | GTICDDGWDSYDAAVACKQLGCPTAVTAIGRVNASKGFGHI | | |
| | WLDSVSCQGHEPAIWQCKHHEWGKHYCNHNEDAGVTCSDGS | | |
| | DLELRLRGGGSRCAGTVEVEIQRLLGKVCDRGWGLKEADVV | | |
| | CRQLGCGSALKTSYQVYSKIQATNTWLFLSSCNGNETSLWD | | |
| | CKNWQWGGLTCDHYEEAKITCSAHREPRLVGGDIPCSGRVE | | |
| | VKHGDTWGSICDSDFSLEAASVLCRELQCGTVVSILGGAHF | | |
| | GEGNGQIWAEEFQCEGHESHLSLCPVAPRPEGTCSHSRDVG | | |
| | VVCSRYTEIRLVNGKTPCEGRVELKTLGAWGSLCNSHWDIE | | |
| | DAHVLCQQLKCGVALSTPGGARFGKGNGQIWRHMFHCTGTE | | |
| | QHMGDCPVTALGASLCPSEQVASVICSGNQSQTLSSCNSSS | | |
| | LGPTRPTIPEESAVACIESGQLRLVNGGGRCAGRVEIYHEG | | |
| | SWGTICDDSWDLSDAHVVCRQLGCGEAINATGSAHFGEGTG | | |
| | PIWLDEMKCNGKESRIWQCHSHGWGQQNCRHKEDAGVICSE | | |
| | FMSLRLTSEASREACAGRLEVFYNGAWGTVGKSSMSETTVG | | |
| | VVCRQLGCADKGKINPASLDKAMSIPMWVDNVQCPKGPDTL | | |
| | WQCPSSPWEKRLASPSEETWITCDNKIRLQEGPTSCSGRVE | | |
| | IWHGGSWGTVCDDSWDLDDAQVVCQQLGCGPALKAFKEAEF | | |
| | GQGTGPIWLNEVKCKGNESSLWDCPARRWGHSECGHKEDAA | | |
| | VNCTDISVQKTPQKATTGRSSRQSSFIAVGILGVVLLAIFV | | |
| | ALFFLTKKRRQRQRLAVSSRGENLVHQIQYREMNSCLNADD | | |
| | LDLMNSSGGHSEPH | | |
| C163A | MSKLRMVLLEDSGSADFRRHFVNLSPFTITVVLLLSACFVT | Q86VB7- | 40 |
| (isoform-4) | SSLGGTDKELRLVDGENKCSGRVEVKVQEEWGTVCNNGWSM | 4 | |
| | EAVSVICNQLGCPTAIKAPGWANSSAGSGRIWMDHVSCRGN | | |
| | ESALWDCKHDGWGKHSNCTHQQDAGVTCSDGSNLEMRLTRG | | |
| | GNMCSGRIEIKFQGRWGTVCDDNFNIDHASVICRQLECGSA | | |
| | VSFSGSSNFGEGSGPIWFDDLICNGNESALWNCKHQGWGKH | | |
| | NCDHAEDAGVICSKGADLSLRLVDGVTECSGRLEVRFQGEW | | |
| | GTICDDGWDSYDAAVACKQLGCPTAVTAIGRVNASKGFGHI | | |
| | WLDSVSCQGHEPAIWQCKHHEWGKHYCNHNEDAGVTCSDGS | | |
| | DLELRLRGGGSRCAGTVEVEIQRLLGKVCDRGWGLKEADVV | | |
| | CRQLGCGSALKTSYQVYSKIQATNTWLFLSSCNGNETSLWD | | |
| | CKNWQWGGLTCDHYEEAKITCSAHREPRLVGGDIPCSGRVE | | |
| | VKHGDTWGSICDSDFSLEAASVLCRELQCGTVVSILGGAHF | | |
| | GEGNGQIWAEEFQCEGHESHLSLCPVAPRPEGTCSHSRDVG | | |
| | VVCSSKTQKTSLIGSYTVKGTGLGSHSCLFLKPCLLPGYTE | | |
| | IRLVNGKTPCEGRVELKTLGAWGSLCNSHWDIEDAHVLCQQ | | |
| | LKCGVALSTPGGARFGKGNGQIWRHMFHCTGTEQHMGDCPV | | |
| | TALGASLCPSEQVASVICSGNQSQTLSSCNSSSLGPTRPTI | | |
| | PEESAVACIESGQLRLVNGGGRCAGRVEIYHEGSWGTICDD | | |
| | SWDLSDAHVVCRQLGCGEAINATGSAHFGEGTGPIWLDEMK | | |
| | CNGKESRIWQCHSHGWGQQNCRHKEDAGVICSEFMSLRLTS | | |
| | EASREACAGRLEVFYNGAWGTVGKSSMSETTVGVVCRQLGC | | |
| | ADKGKINPASLDKAMSIPMWVDNVQCPKGPDTLWQCPSSPW | | |
| | EKRLASPSEETWITCDNKIRLQEGPTSCSGRVEIWHGGSWG | | |
| | TVCDDSWDLDDAQVVCQQLGCGPALKAFKEAEFGQGTGPIW | | |
| | LNEVKCKGNESSLWDCPARRWGHSECGHKEDAAVNCTDISV | | |
| | QKTPQKATTGRSSRQSSFIAVGILGVVLLAIFVALFFLTKK | | |
| | RRQRQRLAVSSRGENLVHQIQYREMNSCLNADDLDLMNSSG | | |
| | GHSEPH | | |
| PTPRJ | MKPAAREARLPPRSPGLRWALPLLLLLLRLGQILCAGGTPS | Q12913-1 | 41 |
| (isoform-1) | PIPDPSVATVATGENGITQISSTAESFHKQNGTGTPQVETN | | |
| | TSEDGESSGANDSLRTPEQGSNGTDGASQKTPSSTGPSPVF | | |
| | DIKAVSISPTNVILTWKSNDTAASEYKYVVKHKMENEKTIT | | |
| | VVHQPWCNITGLRPATSYVFSITPGIGNETWGDPRVIKVIT | | |
| | EPIPVSDLRVALTGVRKAALSWSNGNGTASCRVLLESIGSH | | |
| | EELTQDSRLQVNISGLKPGVQYNINPYLLQSNKTKGDPLGT | | |
| | EGGLDASNTERSRAGSPTAPVHDESLVGPVDPSSGQQSRDT | | |
| | EVLLVGLEPGTRYNATVYSQAANGTEGQPQAIEFRTNAIQV | | |
| | FDVTAVNISATSLTLIWKVSDNESSSNYTYKIHVAGETDSS | | |
| | NLNVSEPRAVIPGLRSSTFYNITVCPVLGDIEGTPGFLQVH | | |
| | TPPVPVSDFRVTVVSTTEIGLAWSSHDAESFQMHITQEGAG | | |
| | NSRVEITTNQSIIIGGLFPGTKYCFEIVPKGPNGTEGASRT | | |
| | VCNRTVPSAVEDIHVVYVTTTEMWLDWKSPDGASEYVYHLV | | |
| | IESKHGSNHTSTYDKAITLQGLIPGTLYNITISPEVDHVWG | | |
| | DPNSTAQYTRPSNVSNIDVSTNTTAATLSWQNFDDASPTYS | | |
| | YCLLIEKAGNSSNATQVVTDIGITDATVTELIPGSSYTVEI | | |
| | FAQVGDGIKSLEPGRKSFCTDPASMASFDCEVVPKEPALVL | | |
| | KWTCPPGANAGFELEVSSGAWNNATHLESCSSENGTEYRTE | | |
| | VTYLNFSTSYNISITTVSCGKMAAPTRNTCTTGITDPPPPD | | |
| | GSPNITSVSHNSVKVKFSGFEASHGPIKAYAVILTTGEAGH | | |
| | PSADVLKYTYEDFKKGASDTYVTYLIRTEEKGRSQSLSEVL | | |
| | KYEIDVGNESTTLGYYNGKLEPLGSYRACVAGFTNITFHPQ | | |
| | NKGLIDGAESYVSFSRYSDAVSLPQDPGVICGAVFGCIFGA | | |
| | LVIVTVGGFIFWRKKRKDAKNNEVSFSQIKPKKSKLIRVEN | | |
| | FEAYFKKQQADSNCGFAEEYEDLKLVGISQPKYAAELAENR | | |
| | GKNRYNNVLPYDISRVKLSVQTHSTDDYINANYMPGYHSKK | | |
| | DFIATQGPLPNTLKDFWRMVWEKNVYAIIMLTKCVEQGRTK | | |
| | CEEYWPSKQAQDYGDITVAMTSEIVLPEWTIRDFTVKNIQT | | |
| | SESHPLRQFHFTSWPDHGVPDTTDLLINFRYLVRDYMKQSP | | |
| | PESPILVHCSAGVGRTGTFIAIDRLIYQIENENTVDVYGIV | | |
| | YDLRMHRPLMVQTEDQYVFLNQCVLDIVRSQKDSKVDLIYQ | | |
| | NTTAMTIYENLAPVTTFGKTNGYIA | | |
| PTPRJ | MKPAAREARLPPRSPGLRWALPLLLLLLRLGQILCAGGTPS | Q12913-2 | 42 |
| (isoform-2) | PIPDPSVATVATGENGITQISSTAESFHKQNGTGTPQVETN | | |
| | TSEDGESSGANDSLRTPEQGSNGTDGASQKTPSSTGPSPVF | | |
| | DIKAVSISPTNVILTWKSNDTAASEYKYVVKHKMENEKTIT | | |
| | VVHQPWCNITGLRPATSYVFSITPGIGNETWGDPRVIKVIT | | |
| | EPIPVSDLRVALTGVRKAALSWSNGNGTASCRVLLESIGSH | | |
| | EELTQDSRLQVNISGLKPGVQYNINPYLLQSNKTKGDPLGT | | |
| | EGGLDASNTERSRAGSPTAPVHDESLVGPVDPSSGQQSRDT | | |
| | EVLLVGLEPGTRYNATVYSQAANGTEGQPQAIEFRTNAIQV | | |
| | FDVTAVNISATSLTLIWKVSDNESSSNYTYKIHVAGETDSS | | |
| | NLNVSEPRAVIPGLRSSTFYNITVCPVLGDIEGTPGFLQVH | | |
| | TPPVPVSDFRVTVVSTTEIGLAWSSHDAESFQMHITQEGAG | | |
| | NSRVEITTNQSIIIGGLFPGTKYCFEIVPKGPNGTEGASRT | | |
| | VCNRTG | | |
| | | EMBL | SEQ |
| | | Identification | ID |
| Protein Name | Amino Acid Sequence | No. | NO |
| ISLR | CAGGCCGAGGCAGGGAGAACTCTCCACTCGGAGGAGGAGCT | AB003184 | 43 |
| | GGGGTCCTCTTCCATCCCGTCTTCATCCTGCCTGGCTGCGT | | |
| | GACCTCGGGAGGCACCATGCAGGAGCTGCATCTGCTCTGGT | | |
| | GGGCGCTTCTCCTGGGCCTGGCTCAGGCCTGCCCTGAGCCC | | |
| | TGCGACTGTGGGGAAAAGTATGGCTTCCAGATCGCCGACTG | | |
| | TGCCTACCGCGACCTAGAATCCGTGCCGCCTGGCTTCCCGG | | |
| | CCAATGTGACTACACTGAGCCTGTCAGCCAACCGGCTGCCA | | |
| | GGCTTGCCGGAGGGTGCCTTCAGGGAGGTGCCCCTGCTGCA | | |
| | GTCGCTGTGGCTGGCACACAATGAGATCCGCACGGTGGCCG | | |
| | CCGGAGCCCTGGCCTCTCTGAGCCATCTCAAGAGCCTGGAC | | |
| | CTCAGCCACAATCTCATCTCTGACTTTGCCTGGAGCGACCT | | |
| | GCACAACCTCAGTGCCCTCCAATTGCTCAAGATGGACAGCA | | |
| | ACGAGCTGACCTTCATCCCCCGCGACGCCTTCCGCAGCCTC | | |
| | CGTGCTCTGCGCTCGCTGCAACTCAACCACAACCGCTTGCA | | |
| | CACATTGGCCGAGGGCACCTTCACCCCGCTCACCGCGCTGT | | |
| | CCCACCTGCAGATCAACGAGAACCCCTTCGACTGCACCTGC | | |
| | GGCATCGTGTGGCTCAAGACATGGGCCCTGACCACGGCCGT | | |
| | GTCCATCCCGGAGCAGGACAACATCGCCTGCACCTCACCCC | | |
| | ATGTGCTCAAGGGTACGCCGCTGAGCCGCCTGCCGCCACTG | | |
| | CCATGCTCGGCGCCCTCAGTGCAGCTCAGCTACCAACCCAG | | |
| | CCAGGATGGTGCCGAGCTGCGGCCTGGTTTTGTGCTGGCAC | | |
| | TGCACTGTGATGTGGACGGGCAGCCGGCCCCTCAGCTTCAC | | |
| | TGGCACATCCAGATACCCAGTGGCATTGTGGAGATCACCAG | | |
| | CCCCAACGTGGGCACTGATGGGCGTGCCCTGCCTGGCACCC | | |
| | CTGTGGCCAGCTCCCAGCCGCGCTTCCAGGCCTTTGCCAAT | | |
| | GGCAGCCTGCTTATCCCCGACTTTGGCAAGCTGGAGGAAGG | | |
| | CACCTACAGCTGCCTGGCCACCAATGAGCTGGGCAGTGCTG | | |
| | AGAGCTCAGTGGACGTGGCACTGGCCACGCCCGGTGAGGGT | | |
| | GGTGAGGACACACTGGGGCGCAGGTTCCATGGCAAAGCGGT | | |
| | TGAGGGAAAGGGCTGCTATACGGTTGACAACGAGGTGCAGC | | |
| | CATCAGGGCCGGAGGACAATGTGGTCATCATCTACCTCAGC | | |
| | CGTGCTGGGAACCCTGAGGCTGCAGTCGCAGAAGGGGTCCC | | |
| | TGGGCAGCTGCCCCCAGGCCTGCTCCTGCTGGGCCAAAGCC | | |
| | TCCTCCTCTTCTTCTTCCTCACCTCCTTCTAGCCCCACCCA | | |
| | GGGCTTCCCTAACTCCTCCCCTTGCCCCTACCAATGCCCCT | | |
| | TTAAGTGCTGCAGGGGTCTGGGGTTGGCAACTCCTGAGGCC | | |
| | TGCATGGGTGACTTCACATTTTCCTACCTCTCCTTCTAATC | | |
| | TCTTCTAGAGCACCTGCTATCCCCAACTTCTAGACCTGCTC | | |
| | CAAACTAGTGACTAGGATAGAATTTGATCCCCTAACTCACT | | |
| | GTCTGCGGTGCTCATTGCTGCTAACAGCATTGCCTGTGCTC | | |
| | TCCTCTCAGGGGCAGCATGCTAACGGGGCGACGTCCTAATC | | |
| | CAACTGGGAGAAGCCTCAGTGGTGGAATTCCAGGCACTGTG | | |
| | ACTGTCAAGCTGGCAAGGGCCAGGATTGGGGGAATGGAGCT | | |
| | GGGGCTTAGCTGGGAGGTGGTCTGAAGCAGACAGGGAATGG | | |
| | GAGAGGAGGATGGGAAGTAGACAGTGGCTGGTATGGCTCTG | | |
| | AGGCTCCCTGGGGCCTGCTCAAGCTCCTCCTGCTCCTTGCT | | |
| | GTTTTCTGATGATTTGGGGGCTTGGGAGTCCCTTTGTCCTC | | |
| | ATCTGAGACTGAAATGTGGGGATCCAGGATGGCTTCCTTCC | | |
| | TCTTACCCTTCCTCCCTCAGCCTGCAACCTCTATCCTGGAA | | |
| | CCTGTCCTCCCTTTCTCCCCAACTATGCATCTGTTGTCTGC | | |
| | TCCTCTGCAAAGGCCAGCCAGCTTGGGAGCAGCAGAGAAAT | | |
| | AAACAGCATTTCTGATGCC | | |
| ALDOA | AGTACCGGGTACGCAGGGGTGCCTCAACCACACTCCGTCCA | M11560 | 44 |
| | CGGACTCTCCGTTATTTTAGGAGGTCCCTGGCCAAAGATTT | | |
| | ATTTCTCTTGACAACCAAGGGCCTCCGTCTGGATTTCCAAG | | |
| | GAAGAATTTCCTCTGAAGCACCGGAACTTGCTACTACCAGC | | |
| | ACCATGCCCTACCAATATCCAGCACTGACCCCGGAGCAGAA | | |
| | GAAGGAGCTGTCTGACATCGCTCACCGCATCGTGGCACCTG | | |
| | GCAAGGGCATCCTGGCTGCAGATGAGTCCACTGGGAGCATT | | |
| | GCCAAGCGGCTGCAGTCCATTGGCACCGAGAACACCGAGGA | | |
| | GAACCGGCGCTTCTACCGCCAGCTGCTGCTGACAGCTGACG | | |
| | ACCGCGTGAACCCCTGCATTGGGGGTGTCATCCTCTTCCAT | | |
| | GAGACACTCTACCAGAAGGCGGATGATGGGCGTCCCTTCCC | | |
| | CCAAGTTATCAAATCCAAGGGCGGTGTTGTGGGCATCAAGG | | |
| | TAGACAAGGGCGTGGTCCCCCTGGCAGGGACAAATGGCGAG | | |
| | ACTACCACCCAAGGGTTGGATGGGCTGTCTGAGCGCTGTGC | | |
| | CCAGTACAAGAAGGACGGAGCTGACTTCGCCAAGTGGCGTT | | |
| | GTGTGCTGAAGATTGGGGAAOAOAOOOCOTOAGOCCTOGCC | | |
| | ATCATGGAAAATGCCAATGTTCTGGCCCGTTATGCCAGTAT | | |
| | CTGCCAGCAGAATGGCATTGTGCCCATCGTGGAGCCTGAGA | | |
| | TCCTCCCTGATGGGGACCATGACTTGAAGCGCTGCCAGTAT | | |
| | GTGACCGAGAAGGTGCTGGCTGCTGTCTACAAGGCTCTGAG | | |
| | TGACCACCACATCTACCTGGAAGGCACCTTGCTGAAGCCCA | | |
| | ACATGGTCACCCCAGGCCATGCTTGCACTCAGAAGTTTTCT | | |
| | CATGAGGAGATTGCCATGGCGACCGTCACAGCGCTGCGCCG | | |
| | CACAGTGCCCCCCGCTGTCACTGGGATCACCTTCCTGTCTG | | |
| | GAGGCCAGAGTGAGGAGGAGGCGTCCATCAACCTCAATGCC | | |
| | ATTAACAAGTGCCCCCTGCTGAAGCCCTGGGCCCTGACCTT | | |
| | CTCCTACGGCCGAGCCCTGCAGGCCTCTGCCCTGAAGGCCT | | |
| | GGGGCGGGAAGAAGGAGAACCTGAAGGCTGCGCAGGAGGAG | | |
| | TATGTCAAGCGAGCCCTGGCCAACAGCCTTGCCTGTCAAGG | | |
| | AAAGTACACTCCGAGCGGTCAGGCTGGGGCTGCTGCCAGCG | | |
| | AGTCCCTCTTCGTCTCTAACCACGCCTATTAAGCGGAGGTG | | |
| | TTCCCAGGCTGCCCCCAACAACTCCAGGCCCTGCCCCCTCC | | |
| | CACTCTTGAAGAGGAGGCCGCCTCCTCGGGGCTCCAGGCTG | | |
| | GCTTGCCCGCGCTCTTTCTTCCCTCGTGACAGTGGTGTGTG | | |
| | GTGTCGTCTGTGAATGCTAAQTCCATCACCCTTTCCGGCAC | | |
| | ACTGCCAAATAAACAGCTATTTAAGGGGG | | |
| CD14 | CAGAATGACATCCCAGGATTACATAAACTGTCAGAGGCAGC | X06882 | 45 |
| | CGAAGAGTTCACAAGTGTGAAGCCTGGAAGCCGGCGGGTGC | | |
| | CGCTGTGTAGGAAAGAAGCTAAAGCACTTCCAGAGCCTGTC | | |
| | CGGAGCTCAGAGGTTCGGAAGACTTATCGACCATGGTGAGT | | |
| | GTAGGGTCTTGGGGTCGAACGCGTGCCACTCGGGAGCCACA | | |
| | GGGGTTGGATGGGGCCTCCTAGACCTCTGCTCTCTCCCCAG | | |
| | GAGCGCGCGTCCTGCTTGTTGCTGCTGCTGCTGCCGCTGGT | | |
| | GCACGTCTCTGCGACCACGCCAGAACCTTGTGAGCTGGACG | | |
| | ATGAAGATTTCCGCTGCGTCTGCAACTTCTCCGAACCTCAG | | |
| | CCCGACTGGTCCGAAGCCTTCCAGTGTGTGTCTGCAGTAGA | | |
| | GGTGGAGATCCATGCCGGCGGTCTCAACCTAGAGCCGTTTC | | |
| | TAAAGCGCGTCGATGCGGACGCCGACCCGCGGCAGTATGCT | | |
| | GACACGGTCAAGGCTCTCCGCGTGCGGCGGCTCACAGTGGG | | |
| | AGCCGCACAGGTTCCTGCTCAGCTACTGGTAGGCGCCCTGC | | |
| | GTGTGCTAGCGTACTCCCGCCTCAAGGAACTGACGCTCGAG | | |
| | GACCTAAAGATAACCGGCACCATGCCTCCGCTGCCTCTGGA | | |
| | AGCCACAGGACTTGCACTTTCCAGCTTGCGCCTACGCAACG | | |
| | TGTCGTGGGCGACAGGGCGTTCTTGGCTCGCCGAGCTGCAG | | |
| | CAGTGGCTCAAGCCAGGCCTCAAGGTACTGAGCATTGCCCA | | |
| | AGCACACTCGCCTGCCTTTTCCTACGAACAGGTTCGCGCCT | | |
| | TCCCGGCCCTTACCAGCCTAGACCTGTCTGACAATCCTGGA | | |
| | CTGGGCGAACGCGGACTGATGGCGGCTCTCTGTCCCCACAA | | |
| | GTTCCCGGCCATCCAGAATCTAGCGCTGCGCAACACAGGAA | | |
| | TGGAGACGCCCACAGGCGTGTGCGCCGCACTGGCGGCGGCA | | |
| | GGTGTGCAGCCCCACAGCCTAGACCTCAGCCACAACTCGCT | | |
| | GCGCGCCACCGTAAACCCTAGCGCTCCGAGATGCATGTGGT | | |
| | CCAGCGCCCTGAACTCCCTCAATCTGTCGTTCGCTGGGCTG | | |
| | GAACAGGTGCCTAAAGGACTGCCAGCCAAGCTCAGAGTGCT | | |
| | CGATCTCAGCTGCAACAGACTGAACAGGGCGCCGCAGCCTG | | |
| | ACGAGCTGCCCGAGGTGGATAACCTGACACTGGACGGGAAT | | |
| | CCCTTCCTGGTCCCTGGAACTGCCCTCCCCCACGAGGGCTC | | |
| | AATGAACTCCGGCGTGGTCCCAGCCTGTGCACGTTCGACCC | | |
| | TGTCGGTGGGGGTGTCGGGAACCCTGGTGCTGCTCCAAGGG | | |
| | GCCCGGGGCTTTGCCTAAGATCCAAGACAGAATAATGAATG | | |
| | GACTCAAACTGCCTTGGCTTCAGGGGAGTCCCGTCAGGACG | | |
| | TTGAGGACTTTTCGACCAATTCAACCCTTTGCCCCACCTTT | | |
| | ATTAAAATCTTAAACAACGGTTCCGTGTCATTCATTTAACA | | |
| | GACCTTTATTGGATGTCTGCTATGTGCTGGGCACAGTACTG | | |
| | GATGGGGAATTC | | |
| COL18A1 | AGAGGCCCTCCGCGCCCCGAGCTCCAGCCGCACTGCCCCGA | AF018081 | 46 |
| | TGGCTCCCTACCCCTGTGGCTGCCACATCCTGCTGCTGCTC | | |
| | TTCTGCTGCCTGGCGGCTGCCCGGGCCAACCTGCTGAACCT | | |
| | GAACTGGCTTTGGTTCAATAATGAGGACACCAGCCACGCAG | | |
| | CTACCACGATCCCTGAGCCCCAGGGGCCCCTGCCTGTGCAG | | |
| | CCCACAGCAGATACCACCACACACGTGACCCCCCGGAATGG | | |
| | TTCCACAGAGCCAGCGACAGCCCCTGGCAGCCCTGAGCCAC | | |
| | CCTCAGAGCTGCTGGAAGATGGCCAGGACACCCCCACTTCT | | |
| | GCCGAGAGCCCGGACGCGCCAGAGGAGAACATTGCCGGTGT | | |
| | CGGAGCCGAGATCCTGAACGTGGCCAAAGGCATCCGGAGCT | | |
| | TCGTCCAGCTGTGGAATGACACTGTCCCCACTGAGAGCTTG | | |
| | GCCAGGGCGGAAACCCTGGTCCTGGAGACTCCTGTGGGCCC | | |
| | CCTTGCCCTCGCTGGGCCTTCCAGCACCCCCCAGGAGAATG | | |
| | GGACCACTCTCTGGCCCAGCCGTGGCATTCCTAGCTCTCCG | | |
| | GGCGCCCACACAACCGAGGCTGGCACCTTGCCTGCACCCAC | | |
| | CCCATCGCCTCCGTCCCTGGGCAGGCCCTGGGCACCACTCA | | |
| | CGGGGCCCTCAGTGCCACCACCATCTTCAGAGCGCATCAGC | | |
| | GAGGAGGTGGGGCTGCTGCAGCTCCTTGGGGACCCCCCGCC | | |
| | CCAGCAGGTCACCCAGACGGATGACCCCGACGTCGGGCTGG | | |
| | CCTACGTCTTTGGGCCAGATGCCAACAGTGGCCAAGTGGCC | | |
| | CGGTACCACTTCCCCAGCCTCTTCTTCCGTGACTTCTCACT | | |
| | GCTGTTCCACATCCGGCCAGCCACAGAGGGCCCAGGGGTGC | | |
| | TGTTCGCCATCACGGACTCGGCGCAGGCCATGGTCTTGCTG | | |
| | GGCGTGAAGCTCTCTGGGGTGCAGGACGGGCACCAGGACAT | | |
| | CTCCCTGCTCTACACAGAACCTGGTGCAGGCCAGACCCACA | | |
| | CAGCCGCCAGCTTCCGGCTCCCCGCCTTCGTCGGCCAGTGG | | |
| | ACACACTTAGCCCTCAGTGTGGCAGGTGGCTTTGTGGCCCT | | |
| | CTACGTGGACTGTGAGGAGTTCCAGAGAATGCCGCTTGCTC | | |
| | GGTCCTCACGGGGCCTGGAGCTGGAGCCTGGCGCCGGGCTC | | |
| | TTCGTGGCTCAGGCGGGGGGAGCGGACCCTGACAAGTTCCA | | |
| | GGGGGTGATCGCTGAGCTGAAGGTGCGCAGGGACCCCCAGG | | |
| | TGAGCCCCATGCACTGCCTGGACGAGGAAGGCGATGACTCA | | |
| | GATGGGGCATTCGGAGACTCTGGCAGCGGGCTCGGGGACGC | | |
| | CCGGGAGCTTCTCAGGGAGGAGACGGGCGCGGCCCTAAAAC | | |
| | CCAGGCTCCCCGCGCCACCCCCCGTCACCACGCCACCCTTG | | |
| | GCTGGAGGCAGCAGCACGGAAGATTCCAGAAGTGAAGAAGT | | |
| | CGAGGAGCAGACCACGGTGGCTTCGTTAGGAGCTCAGACAC | | |
| | TTCCTGGCTCAGATTCTGTCTCCACGTGGGACGGGAGTGTC | | |
| | CGGACCCCTGGGGGCCGCGTGAAAGAGGGCGGCCTGAAGGG | | |
| | GCAGAAAGGGGAGCCAGGTGTTCCGGGCCCACCTGGCCGGG | | |
| | CAGGCCCCCCAGGATCCCCATGCCTACCTGGTCCCCCGGGT | | |
| | CTCCCGTGCCCAGTGAGTCCCCTGGGTCCTGCAGGCCCAGC | | |
| | GTTGCAAACTGTCCCCGGACCACAAGGACCCCCAGGGCCTC | | |
| | CGGGGAGGGACGGCACCCCTGGAAGGGACGGCGAGCCGGGC | | |
| | GACCCCGGTGAAGACGGAAAGCCGGGCGACACCGGGCCACA | | |
| | AGGCTTCCCTGGGACTCCAGGGGATGTAGGTCCCAAGGGAG | | |
| | ACAAGGGAGACCCTGGGGTTGGAGAGAGAGGGCCCCCAGGA | | |
| | CCCCAAGGGCCTCCAGGGCCCCCAGGACCCTCCTTCAGACA | | |
| | CGACAAGCTGACCTTCATTGACATGGAGGGATCTGGCTTTG | | |
| | GGGGCGATCTGGAGGCCCTGCGGGGTCCTCGAGGCTTCCCT | | |
| | GGACCTCCCGGACCCCCCGGTGTCCCAGGCCTGCCCGGCGA | | |
| | GCCAGGCCGCTTTGGGGTGAACAGCTCCGACGTCCCAGGAC | | |
| | CCGCCGGCCTTCCTGGTGTGCCTGGGCGCGAGGGTCCCCCC | | |
| | GGGTTTCCTGGCCTCCCGGGACCCCCAGGCCCTCCGGGAAG | | |
| | AGAGGGGCCCCCAGGAAGGACTGGGCAGAAAGGCAGCCTGG | | |
| | GTGAAGCAGGCGCCCCAGGACATAAGGGGAGCAAGGGAGCC | | |
| | CCCGGTCCTGCTGGTGCTCGTGGGGAGAGCGGCCTGGCAGG | | |
| | AGCCCCCGGACCTGCTGGACCACCAGGCCCCCCTGGGCCCC | | |
| | CTGGGCCCCCAGGACCAGGACTCCCCGCTGGATTTGATGAC | | |
| | ATGGAAGGCTCCGGGGGGCCCTTCTGGTCAACAGCCCGAAG | | |
| | CGCTGATGGGCCACAGGGACCTCCCGGCCTGCCGGGACTTA | | |
| | AGGGGGATCCTGGCGTGCCTGGGCTGCCGGGGGCGAAGGGA | | |
| | GAAGTTGGAGCAGATGGAATCCCCGGGTTCCCCGGCCTCCC | | |
| | TGGCAGAGAGGGCATTGCTGGGCCCCAGGGGCCAAAGGGAG | | |
| | ACAGAGGCAGCCGGGGAGAAAAGGGAGATCCAGGGAAGGAC | | |
| | GGAGTCGGGCAGCCGGGCCTCCCTGGCCCCCCCGGACCCCC | | |
| | GGGACCTGTGGTCTACGTGTCGGAGCAGGACGGATCCGTCC | | |
| | TGAGCGTGCCGGGACCTGAGGGCCGGCCGGGTTTCGCAGGC | | |
| | TTTCCCGGACCTGCAGGACCCAAGGGCAACCTGGGCTCTAA | | |
| | GGGCGAACGAGGCTCCCCGGGACCCAAGGGTGAGAAGGGTG | | |
| | AACCGGGCAGCATCTTCAGCCCCGACGGCGGTGCCCTGGGC | | |
| | CCTGCCCAGAAAGGAGCCAAGGGAGAGCCGGGCTTCCGAGG | | |
| | ACCCCCGGGTCCATACGGACGGCCGGGGTACAAGGGAGAGA | | |
| | TTGGCTTTCCTGGACGGCCGGGTCGCCCCGGGATGAACGGA | | |
| | TTGAAAGGAGAGAAAGGGGAGCCGGGAGATGCCAGCCTTGG | | |
| | ATTTGGCATGAGGGGAATGCCCGGCCCCCCAGGACCTCCAG | | |
| | GGCCCCCAGGCCCTCCAGGGACTCCTGTTTACGACAGCAAT | | |
| | GTGTTTGCTGAGTCCAGCCGCCCCGGGCCTCCAGGATTGCC | | |
| | AGGGAATCAGGGCCCTCCAGGACCCAAGGGCGCCAAAGGAG | | |
| | AAGTGGGCCCCCCCGGACCACCAGGGCAGTTTCCGTTTGAC | | |
| | TTTCTTCAGTTGGAGGCTGAAATGAAGGGGGAGAAGGGAGA | | |
| | CCGAGGTGATGCAGGACAGAAAGGCGAAAGGGGGGAGCCCG | | |
| | GGGGCGGCGGTTTCTTCGGCTCCAGCCTGCCCGGCCCCCCC | | |
| | GGCCCCCCAGGCCCACGTGGCTACCCTGGGATTCCAGGTCC | | |
| | CAAGGGAGAGAGCATCCGGGGCCAGCCCGGCCCACCTGGAC | | |
| | CTCAGGGACCCCCCGGCATCGGCTACGAGGGGCGCCAGGGC | | |
| | CCTCCCGGCCCCCCAGGCCCCCCAGGGCCCCCTTCATTTCC | | |
| | TGGCCCTCACAGGCAGACTATCAGCGTTCCCGGCCCTCCGG | | |
| | GCCCCCCTGGGCCCCCTGGGCCCCCTGGAACCATGGGCGCC | | |
| | TCCTCAGGGGTGAGGCTCTGGGCTACACGCCAGGCCATGCT | | |
| | GGGCCAGGTGCACGAGGTTCCCGAGGGCTGGCTCATCTTCG | | |
| | TGGCCGAGCAGGAGGAGCTCTACGTCCGCGTGCAGAACGGG | | |
| | TTCCGGAAGGTCCAGCTGGAGGCCCGGACACCACTCCCACG | | |
| | AGGGACGGACAATGAAGTGGCCGCCTTGCAGCCCCCCGTGG | | |
| | TGCAGCTGCACGACAGCAACCCCTACCCGCGGCGGGAGCAC | | |
| | CCCCACCCCACCGCGCGGCCCTGGCGGGCAGATGACATCCT | | |
| | GGCCAGCCCCCCTCGCCTGCCCGAGCCCCAGCCCTACCCCG | | |
| | GAGCCCCGCACCACAGCTCCTACGTGCACCTGCGGCCGGCG | | |
| | CGACCCACAAGCCCACCCGCCCACAGCCACCGCGACTTCCA | | |
| | GCCGGTGCTCCACCTGGTTGCGCTCAACAGCCCCCTGTCAG | | |
| | GCGGCATGCGGGGCATCCGCGGGGCCGACTTCCAGTGCTTC | | |
| | CAGCAGGCGCGGGCCGTGGGGCTGGCGGGCACCTTCCGCGC | | |
| | CTTCCTGTCCTCGCGCCTGCAGGACCTGTACAGCATCGTGC | | |
| | GCCGTGCCGACCGCGCAGCCGTGCCCATCGTCAACCTCAAG | | |
| | GACGAGCTGCTGTTTCCCAGCTGGGAGGCTCTGTTCTCAGG | | |
| | CTCTGAGGGTCCGCTGAAGCCCGGGGCACGCATCTTCTCCT | | |
| | TTGACGGCAAGGACGTCCTGAGGCACCCCACCTGGCCCCAG | | |
| | AAGAGCGTGTGGCATGGCTCGGACCCCAACGGGCGCAGGCT | | |
| | GACCGAGAGCTACTGTGAGACGTGGCGGACGGAGGCTCCCT | | |
| | CGGCCACGGGCCAGGCCTCCTCGCTGCTGGGGGGCAGGCTC | | |
| | CTGGGGCAGAGTGCCGCGAGCTGCCATCACGCCTACATCGT | | |
| | GCTCTGCATTGAGAACAGCTTCATGACTGCCTCCAAGTAGC | | |
| | CACCGCCTGGATGCGGATGGCCGGAGAGGACCGGCGGCTCG | | |
| | GAGGAAGCCCCCACCGTGGGCAGGGAGCGGCCGGCCAGCCC | | |
| | CTGGCCCCAGGACCTGGCTGCCATACTTTCCTGTATAGTTC | | |
| | ACGTTTCATGTAATCCTCAAGAAATAAAAGGAAGCCAAAGA | | |
| | GTGTATTTTTTTAAAAGTTTAAAACAGAAGCCTGATGCTGA | | |
| | CATTCACCTGCCCCAACTCTCCCCTGACCTGTGAGCCCAGC | | |
| | TGGGTCAGGCAGGGTGCAGTATCATGCCCTGTGCAACCTCT | | |
| | TGGCCTGATCAGACCACGGCTCGATTTCTCCAGGATTTCCT | | |
| | GCTTTGGGAAGCCGTGCTCGCCCCAGCAGGTGCTGACTTCA | | |
| | TCTCCCACCTAGCAGCACCGTTCTGTGCACAAAACCCAGAC | | |
| | CTGTTAGCAGACAGGCCCCGTGAGGCAATGGGAGCTGAGGC | | |
| | CACACTCAGCACAAGGCCATCTGGGCTCCTCCAGGGTGTGT | | |
| | GCTCGCCCTGCGGTAGATGGGAGGGAGGCTCAGGTCCCTGG | | |
| | GGCTAGGGGGAGCCCCTTCTGCTCAGCTCTGGGCCATTCTC | | |
| | CACAGCAACCCCAGGCTGAAGCAGGTTCCCAAGCTCAGAGG | | |
| | CGCACTGTGACCCCCAGCTCCGGCCTGTCCTCCAACACCAA | | |
| | GCACAGCAGCCTGGGGCTGGCCTCCCAAATGAGCCATGAGA | | |
| | TGATACATCCAAAGCAGACAGCTCCACCCTGGCCGAGTCCA | | |
| | AGCTGGGAGATTCAAGGGACCCATGAGTTGGGGTCTGGCAG | | |
| | CCTCCCATCCAGGGCCCCCATCTCATGCCCCTGGCTGGGAC | | |
| | GTGGCTCAGCCAGCACTTGTCCAGCTGAGCGCCAGGATGGA | | |
| | ACACGGCCACATCAAAGAGGCTGAGGCTGGCACAGGACATG | | |
| | CGGTAGCCAGCACACAGGGCAGTGAGGGAGGGCTGTCATCT | | |
| | GTGCACTGCCCATGGACAGGCTGGCTCCAGATGCAGGGCAG | | |
| | TCATTGGCTGTCTCCTAGGAAACCCATATCCTTACCCTCCT | | |
| | TGGGACTGAAGGGGAACCCCGGGGTGCCCACAGGCCGCCCT | | |
| | GCGGGTGAACAAAGCAGCCACGAGGTGCAACAAGGTCCTCT | | |
| | GTCAGTCACAGCCACCCCTGAGATCCGGCAACATCAACCCG | | |
| | AGTCATTCGTTCTGTGGAGGGACAAGTGGACTCAGGGCAGC | | |
| | GCCAGGCTGACCACAGCACAGCCAACACGCACCTGCCTCAG | | |
| | GACTGCGACGAAACCGGTGGGGCTGGTTCTGTAATTGTGTG | | |
| | TGATGTGAAGCCAATTCAGACAGGCAAATAAAAGTGACCTT | | |
| | TTACACTGAAAAAAAAAAAAAAAAA// | | |
| IGFBP3 | CTCAGCGCCCAGCCGCTTCCTGCCTGGATTCCACAGCTTCG | M31159 | 47 |
| | CGCCGTGTACTGTCGCCCCATCCCTGCGCGCCCAGCCTGCC | | |
| | AAGCAGCGTGCCCCGGTTGCAGGCGTCATGCAGCGGGCGCG | | |
| | ACCCACGCTCTGGGCCGCTGCGCTGACTCTGCTGGTGCTGC | | |
| | TCCGCGGGCCGCCGGTGGCGCGGGCTGGCGCGAGCTCGGGG | | |
| | GGCTTGGGTCCCGTGGTGCGCTGCGAGCCGTGCGACGCGCG | | |
| | TGCACTGGCCCAGTGCGCGCCTCCGCCCGCCGTGTGCGCGG | | |
| | AGCTGGTGCGCGAGCCGGGCTGCGGCTGCTGCCTGACGTGC | | |
| | GCACTGAGCGAGGGCCAGCCGTGCGGCATCTACACCGAGCG | | |
| | CTGTGGCTCCGGCCTTCGCTGCCAGCCGTCGCCCGACGAGG | | |
| | CGCGACCGCTGCAGGCGCTGCTGGACGGCCGCGGGCTCTGC | | |
| | GTCAACGCTAGTGCCGTCAGCCGCCTGCGCGCCTACCTGCT | | |
| | GCCAGCGCCGCCAGCTCCAGGAAATGCTAGTGAGTCGGAGG | | |
| | AAGACCGCAGCGCCGGCAGTGTGGAGAGCCCGTCCGTCTCC | | |
| | AGCACGCACCGGGTGTCTGATCCCAAGTTCCACCCCCTCCA | | |
| | TTCAAAGATAATCATCATCAAGAAAGGGCATGCTAAAGACA | | |
| | GCCAGCGCTACAAAGTTGACTACGAGTCTCAGAGCACAGAT | | |
| | ACCCAGAACTTCTCCTCCGAGTCCAAGCGGGAGACAGAATA | | |
| | TGGTCCCTGCCGTAGAGAAATGGAAGACACACTGAATCACC | | |
| | TGAAGTTCCTCAATGTGCTGAGTCCCAGGGGTGTACACATT | | |
| | CCCAACTGTGACAAGAAGGGATTTTATAAGAAAAAGCAGTG | | |
| | TCGCCCTTCCAAAGGCAGGAAGCGGGGCTTCTGCTGGTGTG | | |
| | TGGATAAGTATGGGCAGCCTCTCCCAGGCTACACCACCAAG | | |
| | GGGAAGGAGGACGTGCACTGCTACAGCATGCAGAGCAAGTA | | |
| | GACGCCTGCCGCAAGTTAATGTGGAGCTCAAATATGCCTTA | | |
| | TTTTGCACAAAAGACTGCCAAGGACATGACCAGCAGCTGGC | | |
| | TACAGCCTCGATTTATATTTCTGTTTGTGGTGAACTGATTT | | |
| | TTTTTAAACCAAAGTTTAGAAAGAGGTTTTTGAAATGCCTA | | |
| | TGGTTTCTTTGAATGGTAAACTTGAGCATCTTTTCACTTTC | | |
| | CAGTAGTCAGCAAAGAGCAGTTTGAATTTTCTTGTCGCTTC | | |
| | CTATCAAAATATTCAGAGACTCGAGCACAGCACCCAGACTT | | |
| | CATGCGCCCGTGGAATGCTCACCACATGTTGGTCGAAGCGG | | |
| | CCGACCACTGACTTTGTGACTTAGGCGGCTGTGTTGCCTAT | | |
| | GTAGAGAACACGCTTCACCCCCACTCCCCGTACAGTGCGCA | | |
| | CAGGCTTTATCGAGAATAGGAAAACCTTTAAACCCCGGTCA | | |
| | TCCGGACATCCCAACGCATGCTCCTGGAGCTCACAGCCTTC | | |
| | TGTGGTGTCATTTCTGAAACAAGGGCGTGGATCCCTCAACC | | |
| | AAGAAGAATGTTTATGTCTTCAAGTGACCTGTACTGCTTGG | | |
| | GGACTATTGGAGAAAATAAGGTGGAGTCCTACTTGTTTAAA | | |
| | AAATATGTATCTAAGAATGTTCTAGGGCACTCTGGGAACCT | | |
| | ATAAAGGCAGGTATTTCGGGCCCTCCTCTTCAGGAATCTTC | | |
| | CTGAAGACATGGCCCAGTCGAAGGCCCAGGATGGCTTTTGC | | |
| | TGCGGCCCCGTGGGGTAGGAGGGACAGAGAGACGGGAGAGT | | |
| | CAGCCTCCACATTCAGAGGCATCACAAGTAATGGCACAATT | | |
| | CTTCGGATGACTGCAGAAAATAGTGTTTTGTAGTTCAACAA | | |
| | CTCAAGACGAAGCTTATTTCTGAGGATAAGCTCTTTAAAGG | | |
| | CAAAGCTTTATTTTCATCTCTCATCTTTTGTCCTCCTTAGC | | |
| | ACAATGTAAAAAAGAATAGTAATATCAGAACAGGAAGGAGG | | |
| | AATGGCTTGCTGGGGAGCCCATCCAGGACACTGGGAGCACA | | |
| | TAGAGATTCACCCATGTTTGTTGAACTTAGAGTCATTCTCA | | |
| | TGCTTTTCTTTATAATTCACACATATATGCAGAGAAGATAT | | |
| | GTTCTTGTTAACATTGTATACAACATAGCCCCAAATATAGT | | |
| | AAGATCTATACTAGATAATCCTAGATGAAATGTTAGAGATG | | |
| | CTATATGATACAACTGTGGCCATGACTGAGGAAAGGAGCTC | | |
| | ACGCCCAGAGACTGGGCTGCTCTCCCGGAGGCCAAACCCAA | | |
| | GAAGGTCTGGCAAAGTCAGGCTCAGGGAGACTCTGCCCTGC | | |
| | TGCAGACCTCGGTGTGGACACACGCTGCATAGAGCTCTCCT | | |
| | TGAAAACAGAGGGGTCTCAAGACATTCTGCCTACCTATTAG | | |
| | CTTTTCTTTATTTTTTTAACTTTTTGGGGGGAAAAGTATTT | | |
| | TTGAGAAGTTTGTCTTGCAATGTATTTATAAATAGTAAATA | | |
| | AAGTTTTTACCATT | | |
| FTL | ACGGAACAGATCCGGGGACTCTCTTCCAGCCTCCGACCGCC | M11147 | 48 |
| | CTCCGATTTCCTCTCCGCTTGCAACCTCCGGGACCATCTTC | | |
| | TCGGCCATCTCCTGCTTCTGGGACCTGCCAGCACCGTTTTT | | |
| | GTGGTTAGCTCCTTCTTGCCAACCAACCATGAGCTCCCAGA | | |
| | TTCGTCAGAATTATTCCACCGACGTGGAGGCAGCCGTCAAC | | |
| | AGCCTGGTCAATTTGTACCTGCAGGCCTCCTACACCTACCT | | |
| | CTCTCTGGGCTTCTATTTCGACCGCGATGATGTGGCTCTGG | | |
| | AAGGCGTGAGCCACTTCTTCCGCGAACTGGCCGAGGAGAAG | | |
| | CGCGAGGGCTACGAGCGTCTCCTGAAGATGCAAAACCAGCG | | |
| | TGGCGGCCGCGCTCTCTTCCAGGACATCAAGAAGCCAGCTG | | |
| | AAGATGAGTGGGGTAAAACCCCAGACGCCATGAAAGCTGCC | | |
| | ATGGCCCTGGAGAAAAAGCTGAACCAGGCCCTTTTGGATCT | | |
| | TCATGCCCTGGGTTCTGCCCGCACGGACCCCCATCTCTGTG | | |
| | ACTTCCTGGAGACTCACTTCCTAGATGAGGAAGTGAAGCTT | | |
| | ATCAAGAAGATGGGTGACCACCTGACCAACCTCCACAGGCT | | |
| | GGGTGGCCCGGAGGCTGGGCTGGGCGAGTATCTCTTCGAAA | | |
| | GGCTCACTCTCAAGCACGACTAAGAGCCTTCTGAGCCCAGC | | |
| | GACTTCTGAAGGGCCCCTTGCAAAGTAATAGGGCTTCTGCC | | |
| | TAAGCCTCTCCCTCCAGCCAATAGGCAGCTTTCTTAACTAT | | |
| | CCTAACAAGCCTTGGACCAAATGGAAATAAAGCTTTTTGAT | | |
| | GC | | |
| TGFBI | GCTTGCCCGTCGGTCGCTAGCTCGCTCGGTGCGCGTCGTCC | M77349 | 49 |
| | CGCTCCATGGCGCTCTTCGTGCGGCTGCTGGCTCTCGCCCT | | |
| | GGCTCTGGCCCTGGGCCCCGCCGCGACCCTGGCGGGTCCCG | | |
| | CCAAGTCGCCCTACCAGCTGGTGCTGCAGCACAGCAGGCTC | | |
| | CGGGGCCGCCAGCACGGCCCCAACGTGTGTGCTGTGCAGAA | | |
| | GGTTATTGGCACTAATAGGAAGTACTTCACCAACTGCAAGC | | |
| | AGTGGTACCAAAGGAAAATCTGTGGCAAATCAACAGTCATC | | |
| | AGCTACGAGTGCTGTCCTGGATATGAAAAGGTCCCTGGGGA | | |
| | GAAGGGCTGTCCAGCAGCCCTACCACTCTCAAACCTTTACG | | |
| | AGACCCTGGGAGTCGTTGGATCCACCACCACTCAGCTGTAC | | |
| | ACGGACCGCACGGAGAAGCTGAGGCCTGAGATGGAGGGGCC | | |
| | CGGCAGCTTCACCATCTTCGCCCCTAGCAACGAGGCCTGGG | | |
| | CCTCCTTGCCAGCTGAAGTGCTGGACTCCCTGGTCAGCAAT | | |
| | GTCAACATTGAGCTGCTCAATGCCCTCCGCTACCATATGGT | | |
| | GGGCAGGCGAGTCCTGACTGATGAGCTGAAACACGGCATGA | | |
| | CCCTCACCTCTATGTACCAGAATTCCAACATCCAGATCCAC | | |
| | CACTATCCTAATGGGATTGTAACTGTGAACTGTGCCCGGCT | | |
| | CCTGAAAGCCGACCACCATGCAACCAACGGGGTGGTGCACC | | |
| | TCATCGATAAGGTCATCTCCACCATCACCAACAACATCCAG | | |
| | CAGATCATTGAGATCGAGGACACCTTTGAGACCCTTCGGGC | | |
| | TGCTGTGGCTGCATCAGGGCTCAACACGATGCTTGAAGGTA | | |
| | ACGGCCAGTACACGCTTTTGGCCCCGACCAATGAGGCCTTC | | |
| | GAGAAGATCCCTAGTGAGACTTTGAACCGTATCCTGGGCGA | | |
| | CCCAGAAGCCCTGAGAGACCTGCTGAACAACCACATCTTGA | | |
| | AGTCAGCTATGTGTGCTGAAGCCATCGTTGCGGGGCTGTCT | | |
| | GTAGAGACCCTGGAGGGCACGACACTGGAGGTGGGCTGCAG | | |
| | CGGGGACATGCTCACTATCAACGGGAAGGCGATCATCTCCA | | |
| | ATAAAGACATCCTAGCCACCAACGGGGTGATCCACTACATT | | |
| | GATGAGCTACTCATCCCAGACTCAGCCAAGACACTATTTGA | | |
| | ATTGGCTGCAGAGTCTGATGTGTCCACAGCCATTGACCTTT | | |
| | TCAGACAAGCCGGCCTCGGCAATCATCTCTCTGGAAGTGAG | | |
| | CGGTTGACCCTCCTGGCTCCCCTGAATTCTGTATTCAAAGA | | |
| | TGGAACCCCTCCAATTGATGCCCATACAAGGAATTTGCTTC | | |
| | GGAACCACATAATTAAAGACCAGCTGGCCTCTAAGTATCTG | | |
| | TACCATGGACAGACCCTGGAAACTCTGGGCGGCAAAAAACT | | |
| | GAGAGTTTTTGTTTATCGTAATAGCCTCTGCATTGAGAACA | | |
| | GCTGCATCGCGGCCCACGACAAGAGGGGGAGGTACGGGACC | | |
| | CTGTTCACGATGGACCGGGTGCTGACCCCCCCAATGGGGAC | | |
| | TGTCATGGATGTCCTGAAGGGAGACAATCGCTTTAGCATGC | | |
| | TGGTAGCTGCCATCCAGTCTGCAGGACTGACGGAGACCCTC | | |
| | AACCGGGAAGGAGTCTACACAGTCTTTGCTCCCACAAATGA | | |
| | AGCCTTCCGAGCCCTGCCACCAAGAGAACGGAGCAGACTCT | | |
| | TGGGAGATGCCAAGGAACTTGCCAACATCCTGAAATACCAC | | |
| | ATTGGTGATGAAATCCTGGTTAGCGGAGGCATCGGGGCCCT | | |
| | GGTGCGGCTAAAGTCTCTCCAAGGTGACAAGCTGGAAGTCA | | |
| | GCTTGAAAAACAATGTGGTGAGTGTCAACAAGGAGCCTGTT | | |
| | GCCGAGCCTGACATCATGGCCACAAATGGCGTGGTCCATGT | | |
| | CATCACCAATGTTCTGCAGCCTCCAGCCAACAGACCTCAGG | | |
| | AAAGAGGGGATGAACTTGCAGACTCTGCGCTTGAGATCTTC | | |
| | AAACAAGCATCAGCGTTTTCCAGGGCTTCCCAGAGGTCTGT | | |
| | GCGACTAGCCCCTGTCTATCAAAAGTTATTAGAGAGGATGA | | |
| | AGCATTAGCTTGAAGCACTACAGGAGGAATGCACCACGGCA | | |
| | GCTCTCCGCCAATTTCTCTCAGATTTCCACAGAGACTGTTT | | |
| | GAATGTTTTCAAAACCAAGTATCACACTTTAATGTACATGG | | |
| | GCCGCACCATAATGAGATGTGAGCCTTGTGCATGTGGGGGA | | |
| | GGAGGGAGAGAGATGTACTTTTTAAATCATGTTCCCCCTAA | | |
| | ACATGGCTGTTAACCCACTGCATGCAGAAACTTGGATGTCA | | |
| | CTGCCTGACATTCACTTCCAGAGAGGACCTATCCCAAATGT | | |
| | GGAATTGACTGCCTATGCCAAGTCCCTGGAAAAGGAGCTTC | | |
| | AGTATTGTGGGGCTCATAAAACATGAATCAAGCAATCCAGC | | |
| | CTCATGGGAAGTCCTGGCACAGTTTTTGTAAAGCCCTTGCA | | |
| | CAGCTGGAGAAATGGCATCATTATAAGCTATGAGTTGAAAT | | |
| | GTTCTGTCAAATGTGTCTCACATCTACACGTGGCTTGGAGG | | |
| | CTTTTATGGGGCCCTGTCCAGGTAGAAAAGAAATGGTATGT | | |
| | AGAGCTTAGATTTCCCTATTGTGACAGAGCCATGGTGTGTT | | |
| | TGTAATAATAAAACCAAAGAAACATA// | | |
| HSP90B1 | GTGGGCGGACCGCGCGGCTGGAGGTGTGAGGATCCGAACCC | X15187 | 50 |
| | AGGGGTGGGGGGTGGAGGCGGCTCCTGCGATCGAAGGGGAC | | |
| | TTGAGACTCACCGGCCGCACGCCATGAGGGCCCTGTGGGTG | | |
| | CTGGGCCTCTGCTGCGTCCTGCTGACCTTCGGGTCGGTCAG | | |
| | AGCTGACGATGAAGTTGATGTGGATGGTACAGTAGAAGAGG | | |
| | ATCTGGGTAAAAGTAGAGAAGGATCAAGGACGGATGATGAA | | |
| | GTAGTACAGAGAGAGGAAGAAGCTATTCAGTTGGATGGATT | | |
| | AAATGCATCACAAATAAGAGAACTTAGAGAGAAGTCGGAAA | | |
| | AGTTTGCCTTCCAAGCCGAAGTTAACAGAATGATGAAACTT | | |
| | ATCATCAATTCATTGTATAAAAATAAAGAGATTTTCCTGAG | | |
| | AGAACTGATTTCAAATGCTTCTGATGCTTTAGATAAGATAA | | |
| | GGCTAATATCACTGACTGATGAAAATGCTCTTTCTGGAAAT | | |
| | GAGGAACTAACAGTCAAAATTAAGTGTGATAAGGAGAAGAA | | |
| | CCTGCTGCATGTCACAGACACCGGTGTAGGAATGACCAGAG | | |
| | AAGAGTTGGTTAAAAACCTTGGTACCATAGCCAAATCTGGG | | |
| | ACAAGCGAGTTTTTAAACAAAATGACTGAAGCACAGGAAGA | | |
| | TGGCCAGTCAACTTCTGAATTGATTGGCCAGTTTGGTGTCG | | |
| | GTTTCTATTCCGCCTTCCTTGTAGCAGATAAGGTTATTGTC | | |
| | ACTTCAAAACACAACAACGATACCCAGCACATCTGGGAGTC | | |
| | TGACTCCAATGAATTTTCTGTAATTGCTGACCCAAGAGGAA | | |
| | ACACTCTAGGACGGGGAACGACAATTACCCTTGTCTTAAAA | | |
| | GAAGAAGCATCTGATTACCTTGAATTGGATACAATTAAAAA | | |
| | TCTCGTCAAAAAATATTCACAGTTCATAAACTTTCCTATTT | | |
| | ATGTATGGAGCAGCAAGACTGAAACTGTTGAGGAGCCCATG | | |
| | GAGGAAGAAGAAGCAGCCAAAGAAGAGAAAGAAGAATCTGA | | |
| | TGATGAAGCTGCAGTAGAGGAAGAAGAAGAAGAAAAGAAAC | | |
| | CAAAGACTAAAAAAGTTGAAAAAACTGTCTGGGACTGGGAA | | |
| | CTTATGAATGATATCAAACCAATATGGCAGAGACCATCAAA | | |
| | AGAAGTAGAAGAAGATGAATACAAAGCTTTCTACAAATCAT | | |
| | TTTCAAAGGAAAGTGATGACCCCATGGCTTATATTCACTTT | | |
| | ACTGCTGAAGGGGAAGTTACCTTCAAATCAATTTTATTTGT | | |
| | ACCCACATCTGCTCCACGTGGTCTGTTTGACGAATATGGAT | | |
| | CTAAAAAGAGCGATTACATTAAGCTCTATGTGCGCCGTGTA | | |
| | TTCATCACAGACGACTTCCATGATATGATGCCTAAATACCT | | |
| | CAATTTTGTCAAGGGTGTGGTGGACTCAGATGATCTCCCCT | | |
| | TGAATGTTTCCCGCGAGACTCTTCAGCAACATAAACTGCTT | | |
| | AAGGTGATTAGGAAGAAGCTTGTTCGTAAAACGCTGGACAT | | |
| | GATCAAGAAGATTGCTGATGATAAATACAATGATACTTTTT | | |
| | GGAAAGAATTTGGTACCAACATCAAGCTTGGTGTGATTGAA | | |
| | GACCACTCGAATCGAACACGTCTTGCTAAACTTCTTAGGTT | | |
| | CCAGTCTTCTCATCATCCAACTGACATTACTAGCCTAGACC | | |
| | AGTATGTGGAAAGAATGAAGGAAAAACAAGACAAAATCTAC | | |
| | TTCATGGCTGGGTCCAGCAGAAAAGAGGCTGAATCTTCTCC | | |
| | ATTTGTTGAGCGACTTCTGAAAAAGGGCTATGAAGTTATTT | | |
| | ACCTCACAGAACCTGTGGATGAATACTGTATTCAGGCCCTT | | |
| | CCCGAATTTGATGGGAAGAGGTTCCAGAATGTTGCCAAGGA | | |
| | AGGAGTGAAGTTCGATGAAAGTGAGAAAACTAAGGAGAGTC | | |
| | GTGAAGCAGTTGAGAAAGAATTTGAGCCTCTGCTGAATTGG | | |
| | ATGAAAGATAAAGCCCTTAAGGACAAGATTGAAAAGGCTGT | | |
| | GGTGTCTCAGCGCCTGACAGAATCTCCGTGTGCTTTGGTGG | | |
| | CCAGCCAGTACGGATGGTCTGGCAACATGGAGAGAATCATG | | |
| | AAAGCACAAGCGTACCAAACGGGCAAGGACATCTCTACAAA | | |
| | TTACTATGCGAGTCAGAAGAAAACATTTGAAATTAATCCCA | | |
| | GACACCCGCTGATCAGAGACATGCTTCGACGAATTAAGGAA | | |
| | GATGAAGATGATAAAACAGTTTTGGATCTTGCTGTGGTTTT | | |
| | GTTTGAAACAGCAACGCTTCGGTCAGGGTATCTTTTACCAG | | |
| | ACACTAAAGCATATGGAGATAGAATAGAAAGAATGCTTCGC | | |
| | CTCAGTTTGAACATTGACCCTGATGCAAAGGTGGAAGAAGA | | |
| | GCCCGAAGAAGAACCTGAAGAGACAGCAGAAGACACAACAG | | |
| | AAGACACAGAGCAAGACGAAGATGAAGAAATGGATGTGGGA | | |
| | ACAGATGAAGAAGAAGAAACAGCAAAGGAATCTACAGCTGA | | |
| | AAAAGATGAATTGTAAATTATACTCTCACCATTTGGATCCT | | |
| | GTGTGGAGAGGGAATGTGAAATTTACATCATTTCTTTTTGG | | |
| | GAGAGACTTGTTTTGGATGCCCCCTAATCCCCTTCTCCCCT | | |
| | GCACTGTAAAATGTGGGATTATGGGTCACAGGAAAAAGTGG | | |
| | GTTTTTTAGTTGAATTTTTTTTAACATTCCTCATGAATGTA | | |
| | AATTTGTACTATTTAACTGACTATTCTTGATGTAAAATCTT | | |
| | GTCATGTGTATAAAAATAAAAAAGATCCCAAAT// | | |
| HSPA5 | CCCGGGGTCACTCCTGCTGGACCTACTCCGACCCCCTAGGC | M19645 | 51 |
| | CGGGAGTGAAGGCGGGACTTGTGCGGTTACCAGCGGAAATG | | |
| | CCTCGGGGTCAGAAGTCGCAGGAGAGATAGACAGCTGCTGA | | |
| | ACCAATGGGACCAGCGGATGGGGCGGATGTTATCTACCATT | | |
| | GGTGAACGTTAGAAACGAATAGCAGCCAATGAATCAGCTGG | | |
| | GGGGGCGGAGCAGTGACGTTTATTGCGGAGGGGGCCGCTTC | | |
| | GAATCGGCGGCGGCCAGCTTGGTGGCCTGGGCCAATGAACG | | |
| | GCCTCCAACGAGCAGGGCCTTCACCAATCGGCGGCCTCCAC | | |
| | GACGGGGCTGGGGGAGGGTATATAAGCCGAGTAGGCGACGG | | |
| | TGAGGTCGACGCCGGCCAAGACAGCACAGACAGATTGACCT | | |
| | ATTGGGGTGTTTCGCGAGTGTGAGAGGGAAGCGCCGCGGCC | | |
| | TGTATTTCTAGACCTGCCCTTCGCCTGGTTCGTGGCGCCTT | | |
| | GTGACCCCGGGCCCCTGCCGCCTGCAAGTCGAAATTGCGCT | | |
| | GTGCTCCTGTGCTACGGCCTGTGGCTGGACTGCCTGCTGCT | | |
| | GCCCAACTGGCTGGCAAGATGAAGCTCTCCCTGGTGGCCGC | | |
| | GATGCTGCTGCTGCTCAGCGCGGCGCGGGCCGAGGAGGAGG | | |
| | ACAAGAAGGAGGACGTGGGCACGGTGGTCGGCATCGACTTG | | |
| | GGGACCACCTACTCCTGGTAAGTGGGGTTGCGGATGAGGGG | | |
| | GACGGGGCGTGGCGCTGGCTGGCGTGAGAAGTGCGGTGCTG | | |
| | ATGTCCCTCTGTCGGGTTTTTGCAGCGTCGGCGTGTTCAAG | | |
| | AACGGCCGCGTGGAGATCATCGCCAACGATCAGGGCAACCG | | |
| | CATCACGCCGTCCTATGTCGCCTTCACTCCTGAAGGGGAAC | | |
| | GTCTGATTGGCGATGCCGCCAAGAACCAGCTCACCTCCAAC | | |
| | CCCGAGAACACGGTCTTTGACGCCAAGCGGCTCATCGGCCG | | |
| | CACGTGGAATGACCCGTCTGTGCAGCAGGACATCAAGTTCT | | |
| | TGCCGTTCAAGGTTCGACCGGTTTTCCTCATCCAGTTAGAG | | |
| | AACGGGTGGGTGGTGGGAGTATTTAGAGTTATAAGTCTCTG | | |
| | GAAAAGTGTTGAGACAACAGTTGAAGGTTATAGACATGATG | | |
| | TATGTAATAACTTTAATACTATTAGTATGTTACAAAACTTA | | |
| | AGACAGTTGCTGTCGTACTGTCTACGATAGTTTAGGAATAA | | |
| | AAGACCGATTAAAACTGAACTTTGTAAGACACCTATACTCC | | |
| | CTGAAGTATTTCTAGTCAATTTGCAGCCCCAAGGGACCAAA | | |
| | ATAAACCAAATTGTGGGGATGGTAGTGGGTCTTTTAAACTT | | |
| | TGAGATGTCATTGTATCTGTGTCTGAAAACAATAATTCTTT | | |
| | AAAATAGGTGGTTGAAAAGAAAACTAAACCATACATTCAAG | | |
| | TTGATATTGGAGGTGGGCAAACAAAGACATTTGCTCCTGAA | | |
| | GAAATTTCTGCCATGGTTCTCACTAAAATGAAAGAAACCGC | | |
| | TGAGGCTTATTTGGGAAAGAAGGTAAATATTTCTAGAACAA | | |
| | TGTTAAGTATTTTTTGATCATTAGTATTCTCGGTTGGCTGT | | |
| | TATGTATAGAAGCCTTCGTGAAGGGTTTCAAAAATTTTAAT | | |
| | CAGAATGGTATTCATGCTTGTCACGGTTTAATTATTGAGTC | | |
| | CCTTTACTATAAGCCAAACAAAAATAGACTTTTCATGTATT | | |
| | ATTTAATGCTTACAATTCCAGGAACAATAAAATTTTATATG | | |
| | TTGTATTCATCAATAATTGGCTTAAAAACTAAAGTGATGGT | | |
| | TTGACTGTAATTTTTTTTTTTTGAGATGGAGTCTTGCTCTG | | |
| | TTGCCCAGGCTGGACTGCAGTGGCACGATCTCAGCTCACTG | | |
| | CAACCTCTGCCTCCCGGGTTAAGCAGCTCTCCTGCCTCAGC | | |
| | CTCCAAGTAATGGAACGACAGGCACACCACCACAGCTGGCT | | |
| | AATTTTTTTTTTTTTTTTTAATTTTCAGTAGAGACAGGGTT | | |
| | TCTCCACATTGCCAGGCTGGTCTTGAAATCCTGCCCTCAGG | | |
| | TTGATCCTCCTGCCTAGCCTCCCAAAGTGCTGGATTATAGG | | |
| | CAGAAGCCACCGCCTGGCCAGACTGTAATTTAAATAAGGGT | | |
| | TAAACTATGTGACAATACACTTAATTATCTTTATCCTTTTA | | |
| | GGTTACCCATGCAGTTGTTACTGTACCAGCCTATTTTAATG | | |
| | ATGCCCAACGCCAAGCAACCAAAGACGCTGGAACTATTGCT | | |
| | GGCCTAAATGTTATGAGGATCATCAACGAGCCGTAAGTATG | | |
| | AAATTCAGGGATACGGCATATTTGCCAAATAGTGGAAATGT | | |
| | GAAGTACTGACAAAACTTTTCCCTTTTTCAATCTAATAGTA | | |
| | CGGCAGCTGCTATTGCTTATGGCCTGGATAAGAGGGAGGGG | | |
| | GAGAAGAACATCCTGGTGTTTGACCTGGGTGGCGGAACCTT | | |
| | CGATGTGTCTCTTCTCACCATTGACAATGGTGTCTTCGAAG | | |
| | TTGTGGCCACTAATGGAGATACTCATCTGGGTGGAGAAGAC | | |
| | TTTGACCAGCGTGTCATGGAACACTTCATCAAACTGTACAA | | |
| | AAAGAAGACGGGCAAAGATGTCAGGAAGGACAATAGAGCTG | | |
| | TGCAGAAACTCCGGCGCGAGGTAGAAAAGGCCAAGGCCCTG | | |
| | TCTTCTCAGCATCAAGCAAGAATTGAAATTGAGTCCTTCTA | | |
| | TGAAGGAGAAGACTTTTCTGAGACCCTGACTCGGGCCAAAT | | |
| | TTGAAGAGCTCAACATGGTATGTTCCTTGTTTTCTGCTTTG | | |
| | CTAATGAGATCTCCTTAGACTCTGAATTCAGGACATTGCAT | | |
| | CTAGATACTTAGATAACAGACATCACAGTAACCATGTCTTT | | |
| | TTTCTAGGATCTGTTCCGGTCTACTATGAAGCCCGTCCAGA | | |
| | AAGTGTTGGAAGATTCTGATTTGAAGAAGTCTGATATTGAT | | |
| | GAAATTGTTCTTGTTGGTGGCTCGACTCGAATTCCAAAGAT | | |
| | TCAGCAACTGGTTAAAGAGTTCTTCAATGGCAAGGAACCAT | | |
| | CCCGTGGCATAAACCCAGATGAAGCTGTAGCGTATGGTGCT | | |
| | GCTGTCCAGGCTGGTGTGCTCTCTGGTGATCAAGATACAGG | | |
| | TAGGTCATCATCGCAGCATCTTTCTTAGTGATTCAGTAGCT | | |
| | TGATGGAAGAGCTCGGTACCCCTATTGCTTTAGAAAATACC | | |
| | AGAATATGAGCAACAAGGTCACACAGCTAGTAAAGGGTATA | | |
| | AGTGAAGACAAGACTGGGGTAGTCTCCAAGATCATTAGCAA | | |
| | CTGTTTAATTCACTGCCTTTAAAATGTGTGTGTTAGAACCT | | |
| | AACCAAATGTTAGAGAGATAAACTTTACATAGCTCATAGGG | | |
| | AGAACTTGAATTAAAAGTTAAATAACTTATCCTTACAGGTG | | |
| | ACCTGGTACTGCTTCATGTATGTCCCCTTACACTTGGTATT | | |
| | GAAACTGTAGGAGGTGTCATGACCAAACTGATTCCAAGTAA | | |
| | TACAGTGGTGCCTACCAAGAACTCTCAGATCTTTTCTACAG | | |
| | CTTCTGATAATCAACCAACTGTTACAATCAAGGTCTATGAA | | |
| | GGTAATTACCTTAAGTTTGGTTAATATCATGGCTTTTTTTT | | |
| | TGAGATGAAGTCTTGCTCTGTTGCCCAGGCTGGACTGCAGT | | |
| | GGCACGATCTCGGCTCACTGCAAATTCTGTCTCCCGGGTTC | | |
| | AAGTGATTCTCCTGCCTCAGCCTCCAGAGTAGCTGGATTAC | | |
| | AGCCTGACCACCACACCTGGCTAATTTCTGTATTTTTAGTA | | |
| | GAGGATGGGCTTTCACCATGTTTCCCAGGCTGGTCTCCAAC | | |
| | TCCTGACCTCAGGTCATCTGCCTGCCTCCACCGTCCCGAAA | | |
| | GTACTGGGATTATAGCGTGAGCCACCACGCCAGATCTATCT | | |
| | ATCATGGCATATTTTAAAAGAACATGACTTAATATGTCCTA | | |
| | TTGAAATGGCTAGGGAACTAAGTAACTGCTGTTTTCAGATG | | |
| | GAGGTCTTAATTTGAATAATGTTGATATTAGATATTTAGCA | | |
| | TTCTTTTTTTTTTTTTTTTAATGGAGTCTTGCTCTGTCGCC | | |
| | TAGGCTGGGGTGCAGTGGCATGACTTGCAACCTCTGCCTCC | | |
| | CGAATAGCTGGGATTACAGGTGCCCACCATCACGCCCGGCT | | |
| | AAGTTTTGTATTTTTAGTAGAGGCGAGTTTCGCCATGTTGG | | |
| | CCAGGCTGGTCTTGAACCCCTAACCTCAGTGATCCCACGGT | | |
| | CACCGACCTGGCCTCCCAAAAGTACTGTACCCAGCCAATGA | | |
| | TTAGCATTCTCACTAATAATAGCATCTGAGCTGGCTCCTAG | | |
| | AGTACAAGAAAAAGGAGTTCACAGTACTTTAAAATAGATAA | | |
| | AATTCAGTTGAGTTAGTAACCTAACTCATTGTTAGTACTAG | | |
| | TTGCTGCTCCTTGTAGACCAATATGAAATTACTTTTAGCTC | | |
| | GATAAAACCAAAAGTGTCACTTTATGCTTCAGACTGAAATG | | |
| | CGGGGATCTAGATGTGCTAATGCTTGTCAGTAACAACTAAC | | |
| | AAGTTTTTCTGTATGTAACTTCTAGGTGAAAGACCCCTGAC | | |
| | AAAAGACAATCATCTTCTGGGTACATTTGATCTGACTGGAA | | |
| | TTCCTCCTGCTCCTCGTGGGGTCCCACAGATTGAAGTCACC | | |
| | TTTGAGATAGATGTGAATGGTATTCTTCGAGTGACAGCTGA | | |
| | AGACAAGGGTACAGGGAACAAAAATAAGATCACAATCACCA | | |
| | ATGACCAGAATCGCCTGACACCTGAAGAAATCGAAAGGATG | | |
| | GTTAATGATGCTGAGAAGTTTGCTGAGGAAGACAAAAAGCT | | |
| | GAAGGAGCGCATTGATACTAGAAATGAGTTGGAAAGCTATG | | |
| | CCTATTCTCTAAAGAATCAGATTGGAGATAAAGAAAAGCTG | | |
| | GGAGGTAAACTTTCCTCTGAAGATAAGGAGACCATGGAAAA | | |
| | AGCTGTAGAAGAAAAGATTGAATGGCTGGAAAGCCACCAAG | | |
| | ATGCTGACATTGAAGACTTCAAAGCTAAGAAGAAGGAACTG | | |
| | GAAGAAATTGTTCAACCAATTATCAGCAAACTCTATGGAAG | | |
| | TGCAGGCCCTCCCCCAACTGGTGAAGAGGATACAGCAGAAA | | |
| | AAGATGAGTTGTAGACACTGATCTGCTAGTGCTGTAATATT | | |
| | GTAAATACTGGACTCAGGAACTTTTGTTAGGAAAAAATTGA | | |
| | AAGAACTTAAGTCTCGAATGTAATTGGAATCTTCACCTCAG | | |
| | AGTGGAGTTGAAACTGCTATAGCCTAAGCGGCTGTTTACTG | | |
| | CTTTTCATTAGCAGTTGCTCACATGTCTTTGGGTGGGGGGG | | |
| | AGAAGAAGAATTGGCCATCTTAAAAAGCGGGTAAAAAACCT | | |
| | GGGTTAGGGTGTGTGTTCACCTTCAAAATGTTCTATTTAAC | | |
| | AACTGGGTCATGTGCATCTGGTGTAGGAGGTTTTTTCTACC | | |
| | ATAAGTGACACCAATAAATGTTTGTTATTTACACTGGTCTA | | |
| | ATGTTTGTGAGAAGCTT// | | |
| LGALS3BP | AATCGAAAGTAGACTCTTTTCTGAAGCATTTCCTGGGATCA | L13210 | 52 |
| | GCCTGACCACGCTCCATACTGGGAGAGGCTTCTGGGTCAAA | | |
| | GGACCAGTCTGCAGAGGGATCCTGTGGCTGGAAGCGAGGAG | | |
| | GCTCCACACGGCCGTTGCAGCTACCGCAGCCAGGATCTGGG | | |
| | CATCCAGGCACGGCCATGACCCCTCCGAGGCTCTTCTGGGT | | |
| | GTGGCTGCTGGTTGCAGGAACCCAAGGCGTGAATGATGGTG | | |
| | ACATGCGGCTGGCCGATGGGGGCGCCACCAACCAGGGCCGC | | |
| | GTGGAGATCTTCTACAGAGGCCAGTGGGGCACTGTGTGTGA | | |
| | CAACCTGTGGGACCTGACTGATGCCAGCGTCGTCTGCCGGG | | |
| | CCCTGGGCTTCGAGAACGCCACCCAGGCTCTGGGCAGAGCT | | |
| | GCCTTCGGGCAAGGATCAGGCCCCATCATGCTGGACGAGGT | | |
| | CCAGTGCACGGGAACCGAGGCCTCACTGGCCGACTGCAAGT | | |
| | CCCTGGGCTGGCTGAAGAGCAACTGCAGGCACGAGAGAGAC | | |
| | GCTGGTGTGGTCTGCACCAATGAAACCAGGAGCACCCACAC | | |
| | CCTGGACCTCTCCAGGGAGCTCTCGGAGGCCCTTGGCCAGA | | |
| | TCTTTGACAGCCAGCGGGGCTGCGACCTGTCCATCAGCGTG | | |
| | AATGTGCAGGGCGAGGACGCCCTGGGCTTCTGTGGCCACAC | | |
| | GGTCATCCTGACTGCCAACCTGGAGGCCCAGGCCCTGTGGA | | |
| | AGGAGCCGGGCAGCAATGTCACCATGAGTGTGGATGCTGAG | | |
| | TGTGTGCCCATGGTCAGGGACCTTCTCAGGTACTTCTACTC | | |
| | CCGAAGGATTGACATCACCCTGTCGTCAGTCAAGTGCTTCC | | |
| | ACAAGCTGGCCTCTGCCTATGGGGCCAGGCAGCTGCAGGGC | | |
| | TACTGCGCAAGCCTCTTTGCCATCCTCCTCCCCCAGGACCC | | |
| | CTCGTTCCAGATGCCCCTGGACCTGTATGCCTATGCAGTGG | | |
| | CCACAGGGGACGCCCTGCTGGAGAAGCTCTGCCTACAGTTC | | |
| | CTGGCCTGGAACTTCGAGGCCTTGACGCAGGCCGAGGCCTG | | |
| | GCCCAGTGTCCCCACAGACCTGCTCCAACTGCTGCTGCCCA | | |
| | GGAGCGACCTGGCGGTGCCCAGCGAGCTGGCCCTACTGAAG | | |
| | GCCGTGGACACCTGGAGCTGGGGGGAGCGTGCCTCCCATGA | | |
| | GGAGGTGGAGGGCTTGGTGGAGAAGATCCGCTTCCCCATGA | | |
| | TGCTCCCTGAGGAGCTCTTTGAGCTGCAGTTCAACCTGTCC | | |
| | CTGTACTGGAGCCACGAGGCCCTGTTCCAGAAGAAGACTCT | | |
| | GCAGGCCCTGGAATTCCACACTGTGCCCTTCCAGTTGCTGG | | |
| | CCCGGTACAAAGGCCTGAACCTCACCGAGGATACCTACAAG | | |
| | CCCCGGATTTACACCTCGCCCACCTGGAGTGCCTTTGTGAC | | |
| | AGACAGTTCCTGGAGTGCACGGAAGTCACAACTGGTCTATC | | |
| | AGTCCAGACGGGGGCCTTTGGTCAAATATTCTTCTGATTAC | | |
| | TTCCAAGCCCCCTCTGACTACAGATACTACCCCTACCAGTC | | |
| | CTTCCAGACTCCACAACACCCCAGCTTCCTCTTCCAGGACA | | |
| | AGAGGGTGTCCTGGTCCCTGGTCTACCTCCCCACCATCCAG | | |
| | AGCTGCTGGAACTACGGCTTCTCCTGCTCCTCGGACGAGCT | | |
| | CCCTGTCCTGGGCCTCACCAAGTCTGGCGGCTCAGATCGCA | | |
| | CCATTGCCTACGAAAACAAAGCCCTGATGCTCTGCGAAGGG | | |
| | CTCTTCGTGGCAGACGTCACCGATTTCGAGGGCTGGAAGGC | | |
| | TGCGATTCCCAGTGCCCTGGACACCAACAGCTCGAAGAGCA | | |
| | CCTCCTCCTTCCCCTGCCCGGCAGGGCACTTCAACGGCTTC | | |
| | CGCACGGTCATCCGCCCCTTCTACCTGACCAACTCCTCAGG | | |
| | TGTGGACTAGACGGCGTGGCCCAAGGGTGGTGAGAACCGGA | | |
| | GAACCCCAGGACGCCCTCACTGCAGGCTCCCCTCCTCGGCT | | |
| | TCCTTCCTCTCTGCAATGACCTTCAACAACCGGCCACCAGA | | |
| | TGTCGCCCTACTCACCTGAGCGCTCAGCTTCAAGAAATTAC | | |
| | TGGAAGGCTTCCACTAGGGTCCACCAGGAGTTCTCCCACCA | | |
| | CCTCACCAGTTTCCAGGTGGTAAGCACCAGGACGCCCTCGA | | |
| | GGTTGCTCTGGGATCCCCCCACAGCCCCTGGTCAGTCTGCC | | |
| | CTTGTCACTGGTCTGAGGTCATTAAAATTACATTGAGGTTC | | |
| | CT// | | |
| PTPRJ | CGGAGGAGGAGGCGAAGGAGACGGCAGGAGGCGGCGACGAC | BC063417 | 53 |
| | GGTGCCCGGGCTCGGGCGCACGGCGGGGCCCGATTCGCGCG | | |
| | TCCGGGGCACGTTCCAGGGCGCGCGGGGCATGAAGCCGGCG | | |
| | GCGCGGGAGGCGCGGCTGCCTCCGCGCTCGCCCGGGCTGCG | | |
| | CTGGGCGCTGCCGCTGCTGCTGCTGCTGCTGCGCCTGGGCC | | |
| | AGATCCTGTGCGCAGGTGGCACCCCTAGTCCAATTCCTGAC | | |
| | CCTTCAGTAGCAACTGTTGCCACAGGGGAAAATGGCATAAC | | |
| | GCAGATCAGCAGTACAGCAGAATCCTTTCATAAACAGAATG | | |
| | GAACTGGAACACCTCAGGTGGAAACAAACACCAGTGAGGAT | | |
| | GGTGAAAGCTCTGGAGCCAACGATAGTTTAAGAACACCTGA | | |
| | ACAAGGATCTAATGGGACTGATGGGGCATCTCAAAAAACTC | | |
| | CCAGTAGCACTGGGCCCAGTCCTGTGTTTGACATTAAAGCT | | |
| | GTTTCCATCAGTCCAACCAATGTGATCTTAACTTGGAAAAG | | |
| | TAATGACACAGCTGCTTCTGAGTACAAGTATGTAGTAAAGC | | |
| | ATAAGATGGAAAATGAGAAGACAATTACTGTTGTGCATCAA | | |
| | CCATGGTGTAACATCACAGGCTTACGTCCAGCGACTTCATA | | |
| | TGTATTCTCCATCACTCCAGGAATAGGCAATGAGACTTGGG | | |
| | GAGATCCCAGAGTCATAAAAGTCATCACAGAGCCGATCCCA | | |
| | GTTTCTGATCTCCGTGTTGCCCTCACGGGTGTGAGGAAGGC | | |
| | TGCTCTCTCCTGGAGCAATGGCAATGGCACCGCCTCCTGCC | | |
| | GGGTTCTTCTTGAAAGCATTGGAAGCCATGAGGAGTTGACT | | |
| | CAAGACTCAAGACTTCAGGTCAATATCTCGGGCCTGAAGCC | | |
| | AGGGGTTCAATACAACATCAACCCGTATCTTCTACAATCAA | | |
| | ATAAGACAAAGGGAGACCCCTTGGGCACAGAAGGTGGCTTG | | |
| | GATGCCAGCAATACAGAGAGAAGCCGGGCAGGGAGCCCCAC | | |
| | CGCCCCTGTGCATGATGAGTCCCTCGTGGGACCTGTGGACC | | |
| | CATCCTCCGGCCAGCAGTCCCGAGACACGGAAGTCCTGCTT | | |
| | GTCGGGTTAGAGCCTGGCACCCGATACAATGCCACCGTTTA | | |
| | TTCCCAAGCAGCGAATGGCACAGAAGGACAGCCCCAGGCCA | | |
| | TAGAGTTCAGGACAAATGCTATTCAGGTTTTTGACGTCACC | | |
| | GCTGTGAACATCAGTGCCACAAGCCTGACCCTGATCTGGAA | | |
| | AGTCAGCGATAACGAGTCGTCATCTAACTATACCTACAAGA | | |
| | TACATGTGGCGGGGGAGACAGATTCTTCCAATCTCAACGTC | | |
| | AGTGAGCCTCGCGCTGTCATCCCCGGACTCCGCTCCAGCAC | | |
| | CTTCTACAACATCACAGTGTGTCCTGTCCTAGGTGACATCG | | |
| | AGGGCACGCCGGGCTTCCTCCAAGTGCACACCCCCCCTGTT | | |
| | CCAGTTTCTGACTTCCGAGTGACAGTGGTCAGCACGACGGA | | |
| | GATCGGCTTAGCATGGAGCAGCCATGATGCAGAATCATTTC | | |
| | AGATGCATATCACACAGGAGGGAGCTGGCAATTCTCGGGTA | | |
| | GAAATAACCACCAACCAAAGTATTATCATTGGTGGCTTGTT | | |
| | CCCTGGAACCAAGTATTGCTTTGAAATAGTTCCAAAAGGAC | | |
| | CAAATGGGACTGAAGGGGCATCTCGGACAGTTTGCAATAGA | | |
| | ACTGGATGATTTGAACACCTGCCTGGAATTCCATCATCTGA | | |
| | AACAGAGTTGGCAGATAAGAATGGCCCCTATGCCAAATTTG | | |
| | GCTCATTGTCTGTTTTTGTAAATAAAGTTTTATTGGATCAC | | |
| | AAAAAAAAAAAAAAAAAAAAAAAAA | | |
| TNXB | CCTTGTGCATTTGGTCTGAAGACAAAGATGACTGCAGGAGT | U24488 | 54 |
| | GGGCAGGCCGGAGTGGGGGTGACCTGGCCTGTGCCAGGAAG | | |
| | GAGGAGGAGTCTGCAGCCCTGTGCGGTTCAACATCCATCAA | | |
| | GGAGTCCAGAGCAGGAGCCAGGCCAGGCGGGAGGGAAAGGC | | |
| | CCTGGGAGGGGCTCTCTAATCTCCCAGCCCCGACTCTGCCC | | |
| | CGTCACTGCCGCTGCTCCTCATTACTCGCTGGGGCTGCTGT | | |
| | CGCCTCCCCGAAGGGTGGCCTTGTCCAGATAGTGGCAAACC | | |
| | TCCCTGCCGTGGATGAGTCAGGAGCATTTTCTTAAGAGGAA | | |
| | CATCACTGGAAAACAAAATGAGCGGGGACACAGAAACCAAC | | |
| | AGCAGTGGCTGCATTTGTGGTACAGGCTCCTCTTCCAGAGC | | |
| | TCGCTGATGCCCACCTCAGACAGGCCTGACCACGGCACGGC | | |
| | TGGTGGGATTTGCCAGTCACCTCAACCAGCCAGTTCCACCC | | |
| | TCAGCTTCTCTCAGAAGGGAGCACCACACTCCTCAAGCTCA | | |
| | GTGAATGTATCCCGGCATGGGTGGGGCCAGAGCCTGTGATA | | |
| | TCTCGAGGTGGGCTCGGCAGGACACCGGGGTGTGGAAGGGG | | |
| | GAAGCGAGCACCTGACTCAGACAGCGCGGGAGCTCGCAGGA | | |
| | GTCACGAGGCCACAGCGACTTCATTGTCTGACTGGGCCTGG | | |
| | ACCTATAAACTTCCCACCTCAGCCTTGGGCCAAGCCTGGAA | | |
| | GATAAAAATGGAGCACCCCATGGCGCCCCTCACTCAGATTC | | |
| | TCCCCTGGGCTTCTCCCACGCAGCCCCAGAAGAGGACACAC | | |
| | CAGCCCCAGAGTTAGCCCCAGAGGCCCCTGAGCCTCCTGAA | | |
| | GAGCCCCGCCTAGGAGTGCTGACCGTGACCGACACAACCCC | | |
| | AGACTCCATGCGCCTCTCGTGGAGCGTGGCCCAGGGCCCCT | | |
| | TTGATTCCTTCGTGGTCCAGTATGAGGACACGAACGGGCAG | | |
| | CCCCAGGCCTTGCTCGTGGACGGCGACCAGAGCAAGATCCT | | |
| | CATCTCAGGCCTGGAGCCCAGCACCCCCTACAGGTTCCTCC | | |
| | TCTATGGCCTCCATGAAGGGAAGCGCCTGGGGCCCCTCTCA | | |
| | GCTGAGGGCACCACAGGGCTGGCTCCTGCTGGTCAGACCTC | | |
| | AGAGGAGTCAAGGCCCCGCCTGTCCCAGCTGTCTGTGACTG | | |
| | ACGTGACCACCAGTTCACTGAGGCTCAACTGGGAGGCCCCA | | |
| | CCGGGGGCCTTCGACTCCTTCCTGCTCCGCTTTGGGGTTCC | | |
| | ATCACCAAGCACTCTGGAGCCGCATCCGCGTCCACTGCTGC | | |
| | AGCGCGAGCTGATGGTGCCGGGGACGCGGCACTCGGCCGTG | | |
| | CTCCGGGACCTGCGTTCCGGGACTCTGTACAGCCTGACACT | | |
| | GTATGGGCTGCGAGGACCCCACAAGGCCGACAGCATCCAGG | | |
| | GAACCGCCCGCACCCTCAGCCCAGTTCTGGAGAGCCCCCGT | | |
| | GACCTCCAATTCAGTGAAATCAGGGAGACCTCAGCCAAGGT | | |
| | CAACTGGATGCCCCCACCATCCCGGGCGGACAGCTTCAAAG | | |
| | TCTCCTACCAGCTGGCGGACGGAGGGGAGCCTCAGAGTGTG | | |
| | CAGGTGGATGGCCAGGCCCGGACCCAGAAACTCCAGGGGCT | | |
| | GATCCCAGGCGCTCGCTATGAGGTGACCGTGGTCTCGGTCC | | |
| | GAGGCTTTGAGGAGAGTGAGCCTCTCACAGGCTTCCTCACC | | |
| | ACGGTTCCTGACGGTCCCACACAGTTGCGTGCACTGAACTT | | |
| | GACCGAGGGATTCGCCGTGCTGCACTGGAAGCCCCCCCAGA | | |
| | ATCCTGTGGACACCTATGACGTCCAGGTCACAGCCCCTGGG | | |
| | GCCCCGCCTCTGCAGGCGGAGACCCCAGGCAGCGCGGTGGA | | |
| | CTACCCCCTGCATGACCTTGTCCTCCACACCAACTACACCG | | |
| | CCACAGTGCGTGGCCTGCGGGGCCCCAACCTCACTTCCCCA | | |
| | GCCAGCATCACCTTCACCACAGGGCTAGAGGCCCCTCGGGA | | |
| | CTTGGAGGCCAAGGAAGTGACCCCCCGCACCGCCCTGCTCA | | |
| | CTTGGACTGAGCCCCCAGTCCGGCCCGCAGGCTACCTGCTC | | |
| | AGCTTCCACACCCCTGGTGGACAGAACCAGGAGATCCTGCT | | |
| | CCCAGGAGGGATCACATCTCACCAGCTCCTTGGCCTCTTTG | | |
| | GGTCCACCTCCTACAATGCACGGCTCCAGGCCATGTGGGGC | | |
| | CAGAGCCTCCTGCCGCCCGTGTCCACCTCTTTCACCACGGG | | |
| | TGGGCTGCGGATCCCCTTCCCCAGGGACTGCGGGGAGGAGA | | |
| | TGCAGAACGGAGCCGGTGCCTCCAGGACCAGCACCATCTTC | | |
| | CTCAACGGCAACCGCGAGCGGCCCCTGAACGTGTTTTGCGA | | |
| | CATGGAGACTGATGGGGGCGGCTGGCTGGTGTTCCAGCGCC | | |
| | GCATGGATGGACAGACAGACTTCTGGAGGGACTGGGAGGAC | | |
| | TATGCCCATGGTTTTGGGAACATCTCTGGAGAGTTCTGGCT | | |
| | GGGCAATGAGGCCCTGCACAGCCTGACACAGGCAGGTGACT | | |
| | ACTCCATCCGCGTGGACCTGCGGGCTGGGGACGAGGCTGTG | | |
| | TTCGCCCAGTACGACTCCTTCCACGTAGACTCGGCTGCGGA | | |
| | GTACTACCGCCTCCACTTGGAGGGCTACCACGGCACCGCAG | | |
| | GGGACTCCATGAGCTACCACAGCGGCAGTGTCTTCTCTGCC | | |
| | CGTGATCGGGACCCCAACAGCTTGCTCATCTCCTGCGCTGT | | |
| | CTCCTACCGAGGGGCCTGGTGGTACAGGAACTGCCACTACG | | |
| | CCAACCTCAACGGGCTCTACGGGAGCACAGTGGACCATCAG | | |
| | GGAGTGAGCTGGTACCACTGGAAGGGCTTCGAGTTCTCGGT | | |
| | GCCCTTCACGGAAATGAAGCTGAGACCAAGAAACTTTCGCT | | |
| | CCCCAGCGGGGGGAGGCTGAGCTGCTGCCCACCTCTCTCGC | | |
| | ACCCCAGTATGACTGCCGAGCACTGAGGGGTCGCCCCGAGA | | |
| | GAAGAGCCAGGGTCCTTCACCACCCAGCCGCTGGAGGAAGC | | |
| | CTTCTCTGCCAGCGATCTCGCAGCACTGTGTTTACAGGGGG | | |
| | GAGGGGAGGGGTTCGTACAGGAGCAATAAAGGAGAAACTGA | | |
| | GGTACCCGAAAA | | |
| KIT | GGGCTCAATTTCCTAACGCTCCCCTCCCCATCCCCATGCCA | X69301 | 55 |
| | CCTCCACGAGCAGCGGCGTCCAGCCTCCTCCCGCCCGAACG | | |
| | TGCTCGAGGGGCGGGCAGTCGACCTTTATTGTCTGGGGAGC | | |
| | ACCTGGCAGGTGGCGGGCCCGTGCCCTAACGTGTGCGTGGT | | |
| | GCCCAGCTTCACAAAGCGAGCGGGCAGCACCTCCTTGGTCC | | |
| | GGGAACGCCTCAGCCTGGCCGTCCACATCCCAGGGGTGGAA | | |
| | AGGTGGAGAGAGAAAGGGGCTCCGGAGTCAAGAGCGGGGAG | | |
| | AGAGGGCGCGCGCGCCCTCCTCCTCCCGGCGGGCACAGCCC | | |
| | CCCGGCATTAACACGTCGAAAGAGCAGGGGCCAGACGCCGC | | |
| | CGGGAAGAAGCGAGACCCGGGCGGGCGCGAGGGAGGGGAGG | | |
| | CGAGGAGGGGCGTGGCCGGCGCGCAGAGGGAGGGCGCTGGG | | |
| | AGGAGGGGCTGCTGCTCGCCGCTCGCGGCTCTGGGGGCTCG | | |
| | GCTTTGCCGCGCTCGCTGCACTTGGGCGAGAGCTGGAACGT | | |
| | GGACCAGAGCTCGGATCCCATCGCAGCTACCGCGATGAGAG | | |
| | GCGCTCGCGGCGCCTGGGATTTTCTCTGCGTTCTGCTCCTA | | |
| | CTGCTTCGCGTCCAGACAGGTGGGACACCGCGGCTGGCACC | | |
| | CCGACCGTGCGACTACTCGGCGAAGCCTGTGCCCGGGAGGT | | |
| | GGTACCCGCCAGGGTGCATCCGGAGAGAGGACTGCGGGCCC | | |
| | TCAGT | | |
| GGH | TCTAGATTTATGAGCTTATTTCCTCATGCCCTCTCCCTGCC | AF147083 | 56 |
| | TTCACCTCTAGCTTGTACCCTGCACGACCTGTTTGCTACAC | | |
| | ACAGTCCCTCCACAGAGCCATGCTTCTTGCCTCTGCACTGC | | |
| | TTCTCATGTGCTTTCCTCTTCTCTGAAAAGCTCCCCCTTTC | | |
| | CCCTATTCCTTTCTCCTGATGAACTCTTAGCCATCTCGAAA | | |
| | AACCCAGGCCACTTGTCATCCCTAGAGGCCTTTTCTACCAT | | |
| | TATTCCTCTTCTCCACAACCTTGGTGCTTTGTGCTGTGTGG | | |
| | GAACGTTTCTTAATGCATGTATTTGCTCTTGTTCTGTCATC | | |
| | CCTCTAGATGAAAAGCTTGTTGAGATCAGGAACTGTATCTT | | |
| | ACTCTCCTTTGTGTTTCTAGGGCTCATAGATGTTGAATGAA | | |
| | TGCCTAATTATTTAAATGATAGAATATTGGATTGGAAGTTA | | |
| | GGAAATCAGGTTCCATGTTGGTTCTGCTTTTGACTATGCCA | | |
| | TACCAGGCTCATTTGAAAATTTTCTCCCACCTCCAAAATAG | | |
| | GAACACTTGAGATGCTTTATTATTTGCATATTTTCTTTCCA | | |
| | CTCTTGATACTTCTGTCTAAATCAGTGAGGCAGGGCATGAT | | |
| | TCCTAGTTTTCAGGAAACTGCACTGGTCTTTTAGTAATGCA | | |
| | GTTTACTAAAGAAGAGTAAATCTCACTTGTTACTGAATGTC | | |
| | AGTGACTTCAAAAAGTTTGTGGGAAAAATGGAATTAAAATA | | |
| | TAAAAATAAAAACTGTAAACTTTATTTCTCAAAATAAGCTC | | |
| | TATCAAGTTTAAGACACTTTTGCCCATGATGATACCAACCT | | |
| | TTTAGTTCATCCCTAAAGAACTGAGGGTCCTGTGAATTGAA | | |
| | CCACGTCAAATGCGGTCTTTTACATTATTAACAGAAATGAG | | |
| | TGCCCTTTAAAGATTTTTTTAAGATTAGGAAACAAGAATAA | | |
| | GTCAGAAGGAGCCAAATCAGGACCATAAGGTCCTAATGGCT | | |
| | TCCCATCAAAATGCTCACTAAATAGCCCTCGGATGAAAGGA | | |
| | ATGAGGAGGAACATTGTCATGCTGGAGAAGGACTCTGGTGA | | |
| | AGCTTTCTTGGGCGATTTTCTGCTAAAGCTTTGGCTGACTT | | |
| | TCTGAAAACACATAAAAAGCAAACGTTACTGTTCTTTGGTT | | |
| | CTCCAGAAAATCAACAAGCAAAATGCCTTGGAGCATCCAAA | | |
| | AAAACATGACCTGTGCCCTTGACCAGTTCACTTTGGCTTTG | | |
| | ACTGGACCACTTCCATCTCTTGGTAGCCATTGCTTTGATGT | | |
| | GTTTTCAGGTTCATACTGGTAAAACCATGTTTTATCTGCAG | | |
| | TGGCAGTTCTTCAAAGTAATGCTCTAGGATCTTGATCCCAC | | |
| | CTGTTAAAAATGTCCATTGAAAGCTCTTCTCTTGTCTGCAG | | |
| | CTGATCTGTGTGCAATGGTTTTGGCACCGATCGAATGGAAA | | |
| | GTTTGCTCAGCTTTAATTTTTCAGTCAGGATTGTGTAAGCT | | |
| | GACCCAACTGAGATGTCTGTGGTATTGGCTGTTGGTTCTGC | | |
| | TGTTTATTTGCGATCTTCTTCAGTTAAGACATGAACAAGAT | | |
| | ACAAATTTTCCTGGCAAATTGATGTGAATAGTCTGCCCTGA | | |
| | GGGCTTCAACATTGTTTCATTCCTTCTTGAAACAAGTTATC | | |
| | CATTTGTAAACTGCTGATTTCTTTGGGACATTATCCCCATA | | |
| | ATTTTTTTGTAAAGCATCAGCGGTTTTACCATTCTTCCATC | | |
| | CAAGCTTCACCGTAAATTTGCTATTTTTTCTGCCTTCAATT | | |
| | TTAGCAAAATTCATATTGCTGTTACAGGGGTTCTTTTAAAA | | |
| | CTGATGTCTTGTCCTTCTTAGTGCCTCATACTGGATCCTGT | | |
| | TCATACAAGTTACTACAAGTTTATTTTGGTGCAAAAAAATG | | |
| | GTGAAATCCTTGCATAATTTTTTTCATAATACACGTTTTCC | | |
| | ATGAGCTTTTTGAAGATTTCTTATATATATGTATCTTTTCC | | |
| | AACGCATGAAGCATTATTGAGGACAAAAATAGTCTTAAATC | | |
| | ATAAAAAAGATTATATCCAATATACTAGAAGGTCTGCCTTT | | |
| | CAATTAACTCTATGTAACAATTTCCTAGTCCCCCAGCCTGT | | |
| | GGGTCTCTTGCTGGTAGCTTCACAGGTAGTCCCAGAATAGA | | |
| | GGGGAAAAACGGCAGTGTCACACGGAAGTGGGGGAGGCAGG | | |
| | GAGCTGAGTGCCTGGAGCTGCATGAGGCAGGTGTTTCCTCT | | |
| | CGTGAATACCCACAAAACTGGGATAAAATGTTTCCCTTCTG | | |
| | TGGCCTGCTCTCTAGTCAGAAAGCTTACTGGGATGAGAACA | | |
| | GACAGTGCTCTTACCCCTAGATATCTCTTCTTTCATTAATT | | |
| | CACTTCATTTCTCCAAGTACTTTCTGATGGTGGTCATGGTT | | |
| | ACAATTCCAAAGCAGAAAATAATAGAGGGGAGATTTGTTTT | | |
| | TTTTAAATCAAAATGAGGAAAGGCACATCTGAAGAAGAGAC | | |
| | AAATATGTACATTTTTCTGAAGGTAACTATTACACATATTC | | |
| | ACTTTTTTTTTGAATTGTGGAATTGTTCATGAGTATGTAAA | | |
| | CATAGAGAGAGTAATATGAACCCTGGGTGTCTATCTATCAG | | |
| | CTTTGACAATTGTCAACAGCTCTGTTTCCCTTCTTGTTTTA | | |
| | TGTCTGCTTTTAAACTTCTAAAAAATATTTTAAAAATTTAT | | |
| | ACCACAAAGTCATCAGTCATTCCATAGACTGAGAGAGAGAC | | |
| | ACAGTTTAGGCAGTTTAGGCAGGGTGTAAAAGGATACCAGA | | |
| | AGTGCTGCCATACTTCATTCTCATATGAATAAGTCATTATG | | |
| | GGAGGACAGGAAAGCATGCTACAAGACAGGGGAGAAAGAGA | | |
| | CCCACTGCGGAAGAAACTTGTATCACCAATAAAATGTGCAT | | |
| | CTGACTTTTGGACAGGGATAGATTCCTCAGCTCAGCTTCTA | | |
| | CTTTGCTATGAATATCTCGAAAAGCAAATCGTCCTACAGAT | | |
| | TGTAAAAGGTTGCTAATCAGTGAAATACGTTACAGGGAATT | | |
| | TTCACATTGATTATGAATGGAAATTATTTTGTGTCTGAGAG | | |
| | AATATGTACAATTTTACCTTGTCTGATAATGTGAATTATAA | | |
| | AATGTTTTACATAAGAAATAAACCAATTTCATTATAAGTAA | | |
| | CATTTTAAACCATTCTTAGTACTTACTAATTTGTGTTCTTC | | |
| | TTACAGGATATAAGTATCCAGTATATGGTGTCCAGTGGCAT | | |
| | CCAGAGAAAGCACCTTATGAGTGGAAGAATTTGGATGGCAT | | |
| | TTCCCATGCACCTAATGCTGTGAAAACCGCATTTTATTTAG | | |
| | CAGAGTTTTTTGTTAATGAAGGTAATATGAGGGTACATAAT | | |
| | TTTGTTATTCTGGGGTAGTTTTGAAGAAAATTGCCCTTATC | | |
| | TGAACTTTTGCCTACCCTTTTGCTCTATAAATGTTTTGTAA | | |
| | GTTCTATAGGTTTAACTTTAAAGAATAATACAAATGTTAAA | | |
| | TAATGTGAAAGCCCTAAAATCAAAGTGTAAGGTATTCTAAT | | |
| | AAAACCAGGACAGTTACTTCAATTATCATACATGCTTCAGT | | |
| | GGGCAGAATTCTTGAACAACAGTGTGAAGAATGTTGAGAGT | | |
| | TTTTTTTTTGGTTTCTTTTTCTTTGTTATTTGTTTTTTGAC | | |
| | AGGATCTTGCTCTGTCGCCCAGGCTGAAATGCAGTGATGTG | | |
| | ATCATAGCTTATTGCAGCCTCAAACTCCTGGGCTCAGGGGA | | |
| | TCCTCCTGCCTCGGCATCCTGAGTAGCTGGGACTACAGGTG | | |
| | CAGACTACCACACCAAGCTCTTTTTTTTTGGATACTTTTAA | | |
| | TTTAGATTTTTCCCCATTACTCTCCATTTCTTAGAATAATG | | |
| | CTTTAATTCTAACAGTGTCTGAGAATTAGGTGTTACTTTTC | | |
| | CAAGACAGTGATACAAATTGAATATATACCCACCAGTTTGT | | |
| | GATTTTAAGGCTACCTCTCTGTAGGCATTGGCATACTGGAG | | |
| | AAAGCAAATAAACTCTGCCTGCTGTTTGGTGATGAAAACAC | | |
| | AGACATATTCATGCTGTGTTATGTTTGTGGGAAAAATCGAG | | |
| | AATTTGGTTGTAGATGCCTATTTCTTAGTTGAGCATTATAG | | |
| | GTACAGTAAGTCCTACGATTTAAGCAGAACTGTGTGTAGCA | | |
| | GGTCCTTGAACAACACTGTTTACTTTGAAGTCGTTTCATTA | | |
| | TAACATTGTTAGAAAAAAATTGGTTTTGTTATACATCGTTG | | |
| | TGCTTAAAAGTACTACAAGAACCTATCGATGACGTTAAGTG | | |
| | AAGACTAGCTGTGTAAGACAGAGGTACAAAAACAACTTGTA | | |
| | AACGGTAGAGATCACTTTGGTGAGGTATAGCCATTTAAAGA | | |
| | CTTAAGTGAACTTTGCTTTCATTCCATCTCCAAGCTTGCCC | | |
| | TAAGTTTTTATCAACTCTCCTGCCATTGCTGGGAAGTCAAG | | |
| | TACTTCCTACTGAGTTCACTCTGCTTTAGAATCATGCAGAG | | |
| | CTGAGTGGATGGTTTTATGACAAAAACTCCAAATTAAAAAA | | |
| | AAAAAGTATCCCATATACAGTATTAGTCCAAAGGAACATTT | | |
| | TCATGAGTGCGTGGAGTGAATGAGGGCAGCAGTGGCAGTGC | | |
| | CGCATTTGCTGCAGTAGTAGTCATGTGGCATTTGGTCTATG | | |
| | TGGTCTTTTATCTTCCAACATTCTTTCTGAAAATGCCGTAA | | |
| | GAGCCTGTATTTACTTTGACTTTGGGAGCTTTAGGAGCTCT | | |
| | CACCTCCTCACATTCCAGCTTTCATCATGCCAAACTTCTCA | | |
| | CTGTGCCTCCTGGTTTTTCATAATGCTGCCTTACCAGTGAA | | |
| | AATGTCTCACTTCTCTGTCTGCCTCAGCTTCACCAGTTTCT | | |
| | CCATCTTTTTTACTCTTGTAGCATCCAGTGATGTACACCAT | | |
| | ATACCATAAAAACATTTTTATCATATGATTCTGTGTGGTTA | | |
| | CGAGGCTGAGCTTTTTGAGTGTTAGGACCTGTTCTGTTTAT | | |
| | ATTTCCATCCCCAGGCTGTGTTATCAAGTCTTGTGTACACA | | |
| | TAGCCACTTGGTAGGTATTTGAATGAGTTGCGGAGTGAGCA | | |
| | TAGCATGGGATATGCTGCAGGGGGAGTACAGCACAGCTGCT | | |
| | GTGGCCATGCGCGACTGTGCCATAAATCGGGCACTGCTTTA | | |
| | TTTGGGGAAATTTTGTCAAGCATTTGCCTCCCTCCCTTCCT | | |
| | TGGTTCCTTCTTCTTCTTCTTTTTTTTTTTTTTTGGAAAGT | | |
| | AAGTTTGTTAGAGAAGTAAAGAAAAAAAAAGATGGCTGTTC | | |
| | TATAGGAAGAGCAGTCGCATTTCTCTTCTTGTTGATATTTT | | |
| | CCCACTTAATAATGCTGATTGCAGGAAGAAATATTATAAAA | | |
| | TAGTCTCTTGAAGATTTTGTCATCTGATCTTTTTAAAAATT | | |
| | AACTTTTTTTCTTGCAGCTCGGAAAAACAACCATCATTTTA | | |
| | AATCTGAATCTGAAGAGGAGAAAGCATTGATTTATCAGTTC | | |
| | AGTCCAATTTATACTGGAAATATTTCTTCATTTCAGCAATG | | |
| | TTACATATTTGATTGAAAGTCTTCAATTTGTTAACAGAGCA | | |
| | AATTTGAATAATTCCATGATTAAACTGTTAGAATAACTTGC | | |
| | TACTCATGGCAAGATTAGGAAGTCACAGATTCTTTTCTAAT | | |
| | AATGTGCCTGGCTCTGATTCTTCATTCTGTATGTGACTATT | | |
| | TATATAACATTAGATAATTAAATAGTGAGACATAAATAGAG | | |
| | TGTTTTTCATGGAAAAGCCTTCCTATATCTGAAGATTGAAA | | |
| | AACATAAATTTACTGAAATACAAATATTTCTTCTAATTGAT | | |
| | TTGCTTGGGAAATAAATACCATCCCTACCGTGCCCACTCCA | | |
| | TCCTCCTTGCTGAAAAAGAAAATAGTCTTTTAAAATCCTAC | | |
| | CAATTGTTCATCTTGTTCATGGTGACGTCTCCGTCCTTTGG | | |
| | GTCTGAGGAGTATTTGTGTGTGTGTGTGTGTGTGTGTGTGT | | |
| | GTGTGTGTAGGTATGTGTGTATAGGTATGTGTGTGCATGTG | | |
| | TGTATCTACTCTTCTGCCCTGTGTTAACTTCATATTTAAAG | | |
| | CGTACACATCCTGAAAACAGAGTCTGTGTCTTGAACTTTTT | | |
| | ATCTTTCACAATGTCCATAATGTCTAGCCCAGCAGGCCCTC | | |
| | AGTAAGTAATTGTCACTAATTATAAGTTTTTTTCCCATGGA | | |
| | AAATAATTTAAAAGCTGTCATATATTTATTTTGGTACACTT | | |
| | TAATGTATTTTTCTTTTTTTTTTTTTAAGATGGAGCATCTC | | |
| | TCTCTTGTTGCCCAGGCTGGAGTGCAATGCTGCAATCTCAG | | |
| | CTCACTGCAACCTCCGCTTCCTGGGTTCAAGCGATTCTCCT | | |
| | GCCTCAGCCTCCTGAGTAGCTGGGATTACAAGCATGTGCCA | | |
| | TCACACCCAGCTAAATTTTGTATTTTTAGTAGAGATGGGGT | | |
| | TTCGCCATGTTGGCCAGGCTGGTCTCAAACTCCTGACCTCA | | |
| | GGTGATCTACCAGCCTCGGCCTCCCAAAGCGCTGGGATTAC | | |
| | AGGCGTGAGCCACTGTGCCCAGCCAACATTAATGTATTTTT | | |
| | CAATCCGTGCTACTCTCCTCCACCCCTCACCATCCCATATA | | |
| | ACCCTCAGAAGTATGAAATTTAGGAACTCCTTGAGGACAAC | | |
| | CAAGCTGCTGGAAGGAAGAGAGAGAGGGTTTGCTGAGCTGT | | |
| | GTCTGGTAAATGGTGTTTATGCATCTGTTCTCTGTGGGCTT | | |
| | CCAGAGCTTCTGCAAGAGAAGGGGAAACAGGAAACTGATTG | | |
| | GGAATGATATTGGAGGGCATCGTGGATGATTTTACCTGCAA | | |
| | CAAGAGAAGAACAATCACCTGCAGACACTGAGCTAAGCCAT | | |
| | AATCTTTGGGGAGTGAGGACAAATAGCACATAGAAATTGGA | | |
| | AGAGATTAATACATTTAATTAACCAAGAAAGAACCTTACTA | | |
| | GAAATGTGGCAGATTTAGTTTCTGTCCATGAATATGAAGAT | | |
| | TCTTTGTTGAGTCTTACTGTTGAATGTGTCTGGCTAAGTTT | | |
| | TTGTCTCCCACCTCTAGA | | |
| S100A6 | AGTACTCGGTGTTCCTGAGGATGCTGTGCATGGCCTACAAC | J02763 | 57 |
| | GACTTCTTTCTAGAGGACAACAAGTGACCAGGGCTGCCCTC | | |
| | CACCCTCACCCTCCACCCTTTGCTGCTGACCTCGGCTGCTC | | |
| | CTCTCACAGACCCTCTTTGGCCCCTGCCCTCCTCTCCCTCC | | |
| | CAGATGGACCCTTCCATGGGAGGAAATAAAGTTTCCATCGC | | |
| | AGGTGCTGGGAGTCTGGTTTTGAAGCTGTCTTGTCTACCTT | | |
| | GGCCTGGGGAGAGGGGAGCACAGGAAGGGTCTCTCCTTGAG | | |
| | TGGGTTGAGACAGCTTCTGCCTCTGGGGGTTAGGGTCCTGG | | |
| | GCTCCCACTGCATTCCTCTCCTTCTTTGGTGTGGACGTCAT | | |
| | TGGTTTTGTCATGGCTTAGTTTTGCCTGCCTGGAAAATGGG | | |
| | GAAGTTAGGCCAGGCGGGAACTCTGCAAGGATGCAGAGGAA | | |
| | GTTAAGAGGGAAAGTTGCTTTGAGAGGAGGACACTGGGAGG | | |
| | GGTTGGGAGTGGCTCCTGAGGGCGGTGATAGGCAGGCAGGC | | |
| | CTGACTTGTCCACAGCTCACCCGGAGGCCACCTTGGCAGCA | | |
| | CCTGTAGGAAGGGCATGTCTGGCCTCCACACCAGCCCCCTC | | |
| | CCTCTTCACCATTTCCCCTTCAATAGCACCACTCTCATCAT | | |
| | CTATGGGGGACAGTGCTTTCTTCTCTCCCTGCCTCCTCCAT | | |
| | CAAAATCTTTTCTCAGGGGAGGGTCTGAAAAGGCCTTCACT | | |
| | CCCCCGTAAATAACGAATGGTGCTTACAGGGCTGGGCTCCC | | |
| | ACGTGCATGCACATTAACACCAAAGGTGCTGTAGTGAATGG | | |
| | AATTTGGGGCACTGAGGGGAAGGCGTGGAGGTGTTGGTAGG | | |
| | AACTTGTTGCTGGTGGGGGATGGGCGCCGTAGATATCCTTT | | |
| | ACACCACTGGCTACTCCCCCTATCTCCTCTGGGGTGACCCT | | |
| | GAGTATCCTCTGTGGGACACCGGCATCCTGTGAGGCGCCCT | | |
| | CCTTGCCCACATTGACGCTGCGCTGGCTCGAGGGTCACATT | | |
| | CACGGTCTGGCAGAGGAAGCAGGGGTGACCGCCGCAGTCCT | | |
| | CCTCCTGCTCCCCTTGCCGAGTCACGTGTCACGAAGAGCAA | | |
| | ACTGAGCAAACTGAGCTGCGCAGATGAGGGGAGACTCGTCA | | |
| | CCAGGCGTGCAGTGGGCACTGCTGGGCTCCCCCATCCCGTC | | |
| | CTAACCCGGAACAGCCCCGGGCAGGAGGCGTGGAAAGTCGA | | |
| | GGGGGTAAACCGCGAATGTGCGTTGTGTAAGCCACGGCGCA | | |
| | GGGTGGGGCGCGGGCGGGACTTGGGCGGGCGGGGTGGGCTT | | |
| | GGCCGAGCTGGCCTCCGGGGCACCGACCGCTATAAGGCCAG | | |
| | TCGGACTGCGACACAGCCCATCCCCTCGACCGCTCGCGTCG | | |
| | CATTTGGCCGCCTCCCTACCGGTGAGTTCTCTCCAGGAGCC | | |
| | CTGGGTACTTTCCAGGGCCAGCTGCCCTCACGCTGGGGGTC | | |
| | CAGCCATCCCCTGCCCAGTTCAGCCGCTGGATCCAGACTGG | | |
| | GGCCATCTGTGGCGCTCCCCCGCTGGAGGGATAGTCAGGAG | | |
| | CAGCAGTGCTGTGCCAGGCAGGCCTTGGGCTAAGGGATCGC | | |
| | AATGGGGTGTGCTCTTTTGGGGTGCGGAAGGGAGTGCCCTG | | |
| | GGTGTGTCATTGCCACCATGTGTGGCCCTGTGAAGCTGTGT | | |
| | TTAAGCTGCCTTTGCAGCCTCCATTCCCCTCCCCTGCCCAG | | |
| | CCATACTCCTCAACTTCTGGATCCCCTGAAGGACAGTTCTC | | |
| | AGCTGTGCCCAAAGCTACTGTTCCTATATGCTTCTTAGAAT | | |
| | CCTTAAGCCACCTCTCTTGCCTTGGCCCTAGTGTGCTCTCT | | |
| | CCTTCCCCTTCAGCCCTGGGCTGTCTCCTGATGCCATTGTG | | |
| | TGTGGCCTGAGACTGGGTGGTTCCAAAGGAGGCGGGGCTAG | | |
| | TGCAGGCAGCATTATTGGGGTGTGTGGGTGAGAAGTCCTTG | | |
| | CTCCCATGGCACTGACTAGGCCCTCTGCTGCCAGCTCCAAG | | |
| | CCCAGCCCTCAGCCATGGCATGCCCCCTGGATCAGGCCATT | | |
| | GGCCTCCTCGTGGCCATCTTCCACAAGTACTCCGGCAGGGA | | |
| | GGGTGACAAGCACACCCTGAGCAAGAAGGAGCTGAAGGAGC | | |
| | TGATCCAGAAGGAGCTCACCATTGGCTCGGTGAGTGGCCTC | | |
| | CTCCCCAGGACCCCTTTTCCCACCCTTGTCCTTTGGAAGCA | | |
| | AGGATTAGGGGAGAGAGAGGTGCCAGGTGCATCTGACTCAC | | |
| | ATTTACCCACATTCTGAGGCCCTGGTCCACATGTAGACCCT | | |
| | GAGCTGTAGACCCACTCTCCCAGCGGGTAGGGGATGCTTCC | | |
| | AGCCGGATATCCATCTCTCCAAATGAGGACCAGTAACTGAG | | |
| | AAGTATCTGAGGAGAAGCAATGCCAAAGTGACATGGGTCCT | | |
| | TGGTGATGAGGGAGCACAGAGCCACTTGCAGAGAGGATTGC | | |
| | CTAGGAGGGGGAAGGGGAAGAATCCAGGGTTGTCATCACCA | | |
| | CTGAGTATGGATTTCACATTCTAACACATTAGAAGCTGCAG | | |
| | GATGCTGAAATTGCAAGGCTGATGGAAGACTTGGACCGGAA | | |
| | CAAGGACCAGGAGGTGAACTTCCAGGAGTATGTCACCTTCC | | |
| | TGGGGGCCTTGGCTTTGATCTACAATGAAGCCCTCAAGGGC | | |
| | TGAAAATAAATAGGGAAGATGGAGACACCCTCTGGGGGTCC | | |
| | TCTCTGAGTCAAATCCAGTGGTGGGTAATTGTACAATAAAT | | |
| | TTTTTTTGGTCAAATTTACCCTTGCGTCTTGGCTTCCGAAT | | |
| | GATTTCTGTTCCTCCTTGGCTTAGTGGGACACCAGCCATTG | | |
| | GAAGATTTGCTCACGGTCAACCTCTGAAAATGACTCATTGA | | |
| | CTCGCCAGGCCAGAGGACCCACCCTGACAAGGCTGCCTCTA | | |
| | GCGCGTAAGGTGCCTTTATGTGAATGAGGAGAGATGCCCCT | | |
| | CTTGGCAACGCCATCCTAAGGAAAGGCTCAAGTGGTTTCCA | | |
| | GTAGAGAGAGTCCTGGGATGAGCTTGGAGATGGAAATGGTC | | |
| | CTTTGGGCCGGGATGTGATGGGGTTTGGGGGCCTGGAAGTG | | |
| | AGGCAGAGATAGTTCCAGAGGCTCCCAGATGTGTTTTGCTC | | |
| | TGGGTGTGGCAAGAGGGGCCTTGGGGTGGGGCAAGTCCCTT | | |
| | TCTCATCACAGCGCAGGGGTTAGATAGGGCACATCTGAGAT | | |
| | GCCTGAGGCTTGGCTCAGGGAGTTTCCTACACCAGTGAGGA | | |
| | CGCTGTGTGACTGAGTCTACTGCGGCTGCCCAGGTCCCAGG | | |
| | TGGAGTGGGGGAGGCACACTCTTGGAGTGTGTCCCGTCATT | | |
| | CAGGGTGAGGGCTTTTTGTTGGAACGGTGGTCTGAGGAGCT | | |
| | GGCAGCTGCACCAACACGTGAACCACGGGGTGTTCAGTAAT | | |
| | GGGGCGGGGTATCCCTGCAGCCTCAGCGTAATGACTCACCC | | |
| | GGCACTTCCACGGGATCCAGCCTGGATCTCAGCCCCCATCA | | |
| | GAGAAGATGACTAATTGAATCATTGTCCATCATCTGGATTA | | |
| | GTGTTTTAAGGCAGAAGGGAAGAGGATAAGGAGGGTAAACG | | |
| | CTGTTTCCGGGTGATGCCACATCATTAAGCCTCTCTAGGCC | | |
| | TAGTCCGAGCTGGGCAAGTTTACCTCTAGCTTCTGGGGAAG | | |
| | AGATCTTGACTTTAGATGGAGA// | | |
| CD14 | CAGAATGACATCCCAGGATTACATAAACTGTCAGAGGCAGC | X06882 | 58 |
| | CGAAGAGTTCACAAGTGTGAAGCCTGGAAGCCGGCGGGTGC | | |
| | CGCTGTGTAGGAAAGAAGCTAAAGCACTTCCAGAGCCTGTC | | |
| | CGGAGCTCAGAGGTTCGGAAGACTTATCGACCATGGTGAGT | | |
| | GTAGGGTCTTGGGGTCGAACGCGTGCCACTCGGGAGCCACA | | |
| | GGGGTTGGATGGGGCCTCCTAGACCTCTGCTCTCTCCCCAG | | |
| | GAGCGCGCGTCCTGCTTGTTGCTGCTGCTGCTGCCGCTGGT | | |
| | GCACGTCTCTGCGACCACGCCAGAACCTTGTGAGCTGGACG | | |
| | ATGAAGATTTCCGCTGCGTCTGCAACTTCTCCGAACCTCAG | | |
| | CCCGACTGGTCCGAAGCCTTCCAGTGTGTGTCTGCAGTAGA | | |
| | GGTGGAGATCCATGCCGGCGGTCTCAACCTAGAGCCGTTTC | | |
| | TAAAGCGCGTCGATGCGGACGCCGACCCGCGGCAGTATGCT | | |
| | GACACGGTCAAGGCTCTCCGCGTGCGGCGGCTCACAGTGGG | | |
| | AGCCGCACAGGTTCCTGCTCAGCTACTGGTAGGCGCCCTGC | | |
| | GTGTGCTAGCGTACTCCCGCCTCAAGGAACTGACGCTCGAG | | |
| | GACCTAAAGATAACCGGCACCATGCCTCCGCTGCCTCTGGA | | |
| | AGCCACAGGACTTGCACTTTCCAGCTTGCGCCTACGCAACG | | |
| | TGTCGTGGGCGACAGGGCGTTCTTGGCTCGCCGAGCTGCAG | | |
| | CAGTGGCTCAAGCCAGGCCTCAAGGTACTGAGCATTGCCCA | | |
| | AGCACACTCGCCTGCCTTTTCCTACGAACAGGTTCGCGCCT | | |
| | TCCCGGCCCTTACCAGCCTAGACCTGTCTGACAATCCTGGA | | |
| | CTGGGOGAACGCGGACTGATGGCGGCTCTCTGTCCCCACAA | | |
| | GTTCCCGGCCATCCAGAATCTAGCGCTGCGCAACACAGGAA | | |
| | TGGAGACGCCCACAGGCGTGTGCGCCGCACTGGCGGCGGCA | | |
| | GGTGTGCAGCCCCACAGCCTAGACCTCAGCCACAACTCGCT | | |
| | GCGCGCCACCGTAAACCCTAGCGCTCCGAGATGCATGTGGT | | |
| | CCAGCGCCCTGAACTCCCTCAATCTGTCGTTCGCTGGGCTG | | |
| | GAACAGGTGCCTAAAGGACTGCCAGCCAAGCTCAGAGTGCT | | |
| | CGATCTCAGCTGCAACAGACTGAACAGGGCGCCGCAGCCTG | | |
| | ACGAGCTGCCCGAGGTGGATAACCTGACACTGGACGGGAAT | | |
| | CCCTTCCTGGTCCCTGGAACTGCCCTCCCCCACGAGGGCTC | | |
| | AATGAACTCCGGCGTGGTCCCAGCCTGTGCACGTTCGACCC | | |
| | TGTCGGTGGGGGTGTCGGGAACCCTGGTGCTGCTCCAAGGG | | |
| | GCCCGGGGCTTTGCCTAAGATCCAAGACAGAATAATGAATG | | |
| | GACTCAAACTGCCTTGGCTTCAGGGGAGTCCCGTCAGGACG | | |
| | TTGAGGACTTTTCGACCAATTCAACCCTTTGCCCCACCTTT | | |
| | ATTAAAATCTTAAACAACGGTTCCGTGTCATTCATTTAACA | | |
| | GACCTTTATTGGATGTCTGCTATGTGCTGGGCACAGTACTG | | |
| | GATGGGGAATTC | | |
| SERPINF1 | GGACGCTGGATTAGAAGGCAGCAAAAAAAGATCTGTGCTGG | M76979 | 59 |
| | CTGGAGCCCCCTCAGTGTGCAGGCTTAGAGGGACTAGGCTG | | |
| | GGTGTGGAGCTGCAGCGTATCCACAGGCCCCAGGATGCAGG | | |
| | CCCTGGTGCTACTCCTCTGCATTGGAGCCCTCCTCGGGCAC | | |
| | AGCAGCTGCCAGAACCCTGCCAGCCCCCCGGAGGAGGGCTC | | |
| | CCCAGACCCCGACAGCACAGGGGCGCTGGTGGAGGAGGAGG | | |
| | ATCCTTTCTTCAAAGTCCCCGTGAACAAGCTGGCAGCGGCT | | |
| | GTCTCCAACTTCGGCTATGACCTGTACCGGGTGCGATCCAG | | |
| | CATGAGCCCCACGACCAACGTGCTCCTGTCTCCTCTCAGTG | | |
| | TGGCCACGGCCCTCTCGGCCCTCTCGCTGGGAGCGGACGAG | | |
| | CGAACAGAATCCATCATTCACCGGGCTCTCTACTATGACTT | | |
| | GATCAGCAGCCCAGACATCCATGGTACCTATAAGGAGCTCC | | |
| | TTGACACGGTCACTGCCCCCCAGAAGAACCTCAAGAGTGCC | | |
| | TCCCGGATCGTCTTTGAGAAGAAGCTRCGCATAAAATCCAG | | |
| | CTTTGTGGCACCTCTGGAAAAGTCATATGGGACCAGGCCCA | | |
| | GAGTCCTGACGGGCAACCCTCGCTTGGACCTGCAAGAGATC | | |
| | AACAACTGGGTGCAGGCGCAGATGAAAGGGAAGCTCGCCAG | | |
| | GTCCACAAAGGAAATTCCCGATGAGATCAGCATTCTCCTTC | | |
| | TCGGTGTGGCGCACTTCAAGGGGCAGTGGGTAACAAAGTTT | | |
| | GACTCCAGAAAGACTTCCCTCGAGGATTTCTACTTGGATGA | | |
| | AGAGAGGACCGTGAGGGTCCCCATGATGTCGGACCCTAAGG | | |
| | CTGTTTTACGCTATGGCTTGGATTCAGATCTCAGCTGCAAG | | |
| | ATTGCCCAGCTGCCCTTGACCGGAAGCATGAGTATCATCTT | | |
| | CTTCCTGCCCCTGAAAGTGACCCAGAATTTGACCTTGATAG | | |
| | AGGAGAGCCTCACCTCCGAGTTCATTCATGACATAGACCGA | | |
| | GAACTGAAGACCGTGCAGGCGGTCCTCACTGTCCCCAAGCT | | |
| | GAAGCTGAGTTACGAAGGCGAAGTCACCAAGTCCCTGCAGG | | |
| | AGATGAAGCTGCAATCCTTGTTTGATTCACCAGACTTTAGC | | |
| | AAGATCACAGGCAAACCCATCAAGCTGACTCAGGTGGAACA | | |
| | CCGGGCTGGCTTTGAGTGGAACGAGGATGGGGCGGGAACCA | | |
| | CCCCCAGCCCAGGGCTGCAGCCTGCCCACCTCACCTTCCCG | | |
| | CTGGACTATCACCTTAACCAGCCTTTCATCTTCGTACTGAG | | |
| | GGACACAGACACAGGGGCCCTTCTCTTCATTGGCAAGATTC | | |
| | TGGACCCCAGGGGCCCCTAATATCCCAGTTTAATATTCCAA | | |
| | TACCCTAGAAGAAAACCCGAGGGACAGCAGATTCCACAGGA | | |
| | CACGAAGGCTGCCCCTGTAAGGTTTCAATGCATACAATAAA | | |
| | AGAGCTTTATCCCT | | |
| SERPINB5 | GGCACGAGTTGTGCTCCTCGCTTGCCTGTTCCTTTTCCACG | U04313 | 60 |
| | CATTTTCCAGGATAACTGTGACTCCAGGCCCGCAATGGATG | | |
| | CCCTGCAACTAGCAAATTCGGCTTTTGCCGTTGATCTGTTC | | |
| | AAACAACTATGTGAAAAGGAGCCACTGGGCAATGTCCTCTT | | |
| | CTCTCCAATCTGTCTCTCCACCTCTCTGTCACTTGCTCAAG | | |
| | TGGGTGCTAAAGGTGACACTGCAAATGAAATTGGACAGGTT | | |
| | CTTCATTTTGAAAATGTCAAAGATATACCCTTTGGATTTCA | | |
| | AACAGTAACATCGGATGTAAACAAACTTAGTTCCTTTTACT | | |
| | CACTGAAACTAATCAAGCGGCTCTACGTAGACAAATCTCTG | | |
| | AATCTTTCTACAGAGTTCATCAGCTCTACGAAGAGACCCTA | | |
| | TGCAAAGGAATTGGAAACTGTTGACTTCAAAGATAAATTGG | | |
| | AAGAAACGAAAGGTCAGATCAACAACTCAATTAAGGATCTC | | |
| | ACAGATGGCCACTTTGAGAACATTTTAGCTGACAACAGTGT | | |
| | GAACGACCAGACCAAAATCCTTGTGGTTAATGCTGCCTACT | | |
| | TTGTTGGCAAGTGGATGAAGAAATTTCCTGAATCAGAAACA | | |
| | AAAGAATGTCCTTTCAGACTCAACAAGACAGACACCAAACC | | |
| | AGTGCAGATGATGAACATGGAGGCCACGTTCTGTATGGGAA | | |
| | ACATTGACAGTATCAATTGTAAGATCATAGAGCTTCCTTTT | | |
| | CAAAATAAGCATCTCAGCATGTTCATCCTACTACCCAAGGA | | |
| | TGTGGAGGATGAGTCCACAGGCTTGGAGAAGATTGAAAAAC | | |
| | AACTCAACTCAGAGTCACTGTCACAGTGGACTAATCCCAGC | | |
| | ACCATGGCCAATGCCAAGGTCAAACTCTCCATTCCAAAATT | | |
| | TAAGGTGGAAAAGATGATTGATCCCAAGGCTTGTCTGGAAA | | |
| | ATCTAGGGCTGAAACATATCTTCAGTGAAGACACATCTGAT | | |
| | TTCTCTGGAATGTCAGAGACCAAGGGAGTGGCCCTATCAAA | | |
| | TGTTATCCACAAAGTGTGCTTAGAAATAACTGAAGATGGTG | | |
| | GGGATTCCATAGAGGTGCCAGGAGCACGGATCCTGCAGCAC | | |
| | AAGGATGAATTGAATGCTGACCATCCCTTTATTTACATCAT | | |
| | CAGGCACAACAAAACTCGAAACATCATTTTCTTTGGCAAAT | | |
| | TCTGTTCTCCTTAAGTGGCATAGCCCATGTTAAGTCCTCCC | | |
| | TGACTTTTCTGTGGATGCCGATTTCTGTAAACTCTGCATCC | | |
| | AGAGATTCATTTTCTAGATACAATAAATTGCTAATGTTGCT | | |
| | GGATCAGGAAGCCGCCAGTACTTGTCATATGTAGCCTTCAC | | |
| | ACAGATAGACCTTTTTTTTTTTCCAATTCTATCTTTTGTTT | | |
| | CCTTTTTTCCCATAAGACAATGACATACGCTTTTAATGAAA | | |
| | AGGAATCACGTTAGAGGAAAAATATTTATTCATTATTTGTC | | |
| | AAATTGTCCGGGGTAGTTGGCAGAAATACAGTCTTCCACAA | | |
| | AGAAAATTCCTATAAGGAAGATTTGGAAGCTCTTCTTCCCA | | |
| | GCACTATGCTTTCCTTCTTTGGGATAGAGAATGTTCCAGAC | | |
| | ATTCTCGCTTCCCTGAAAGACTGAAGAAAGTGTAGTGCATG | | |
| | GGACCCACGAAACTGCCCTGGCTCCAGTGAAACTTGGGCAC | | |
| | ATGCTCAGGCTACTATAGGTCCAGAAGTCCTTATGTTAAGC | | |
| | CCTGGCAGGCAGGTGTTTATTAAAATTCTGAATTTTGGGGA | | |
| | TTTTCAAAAGATAATATTTTACATACACTGTATGTTATAGA | | |
| | ACTTCATGGATCAGATCTGGGGCAGCAACCTATAAATCAAC | | |
| | ACCTTAATATGCTGCAACAAAATGTAGAATATTCAGACAAA | | |
| | ATGGATACATAAAGACTAAGTAGCCCATAAGGGGTCAAAAT | | |
| | TTGCTGCCAAATGCGTATGCCACCAACTTACAAAAACACTT | | |
| | CGTTCGCAGAGCTTTTCAGATTGTGGAATGTTGGATAAGGA | | |
| | ATTATAGACCTCTAGTAGCTGAAATGCAAGACCCCAAGAGG | | |
| | AAGTTCAGATCTTAATATAAATTCACTTTCATTTTTGATAG | | |
| | CTGTCCCATCTGGTCATGTGGTTGGCACTAGACTGGTGGCA | | |
| | GGGGCTTCTAGCTGACTCGCACAGGGATTCTCACAATAGCC | | |
| | GATATCAGAATTTGTGTTGAAGGAACTTGTCTCTTCATCTA | | |
| | ATATGATAGCGGGAAAAGGAGAGGAAACTACTGCCTTTAGA | | |
| | AAATATAAGTAAAGTGATTAAAGTGCTCACGTTACCTTGAC | | |
| | ACATAGTTTTTCAGTCTATGGGTTTAGTTACTTTAGATGGC | | |
| | AAGCATGTAACTTATATTAATAGTAATTTGTAAAGTTGGGT | | |
| | GGATAAGCTATCCCTGTTGCCGGTTCATGGATTACTTCTCT | | |
| | ATAAAAAATATATATTTACCAAAAAATTTTGTGACATTCCT | | |
| | TCTCCCATCTCTTCCTTGACATGCATTGTAAATAGGTTCTT | | |
| | CTTGTTCTGAGATTCAATATTGAATTTCTCCTATGCTATTG | | |
| | ACAATAAAATATTATTGAACTACC | | |
| GSN | GCCGTGTCGCCACCATGGCTCCGCACCGCCCCGCGCCCGCG | X04412 | 61 |
| | CTGCTTTGCGCGCTGTCCCTGGCGCTGTGCGCGCTGTCGCT | | |
| | GCCCGTCCGCGCGGCCACTGCGTCGCGGGGGGCGTCCCAGG | | |
| | CGGGGGCGCCCCAGGGGCGGGTGCCCGAGGCGCGGCCCAAC | | |
| | AGCATGGTGGTGGAACACCCCGAGTTCCTCAAGGCAGGGAA | | |
| | GGAGCCTGGCCTGCAGATCTGGCGTGTGGAGAAGTTCGATC | | |
| | TGGTGCCCGTGCCCACCAACCTTTATGGAGACTTCTTCACG | | |
| | GGCGACGCCTACGTCATCCTGAAGACAGTGCAGCTGAGGAA | | |
| | CGGAAATCTGCAGTATGACCTCCACTACTGGCTGGGCAATG | | |
| | AGTGCAGCCAGGATGAGAGCGGGGCGGCCGCCATCTTTACC | | |
| | GTGCAGCTGGATGACTACCTGAACGGCCGGGCCGTGCAGCA | | |
| | CCGTGAGGTCCAGGGCTTCGAGTCGGCCACCTTCCTAGGCT | | |
| | ACTTCAAGTCTGGCCTGAAGTACAAGAAAGGAGGTGTGGCA | | |
| | TCAGGATTCAAGCACGTGGTACCCAACGAGGTGGTGGTGCA | | |
| | GAGACTCTTCCAGGTCAAAGGGCGGCGTGTGGTCCGTGCCA | | |
| | CCGAGGTACCTGTGTCCTGGGAGAGCTTCAACAATGGCGAC | | |
| | TGCTTCATCCTGGACCTGGGCAACAACATCCACCAGTGGTG | | |
| | TGGTTCCAACAGCAATCGGTATGAAAGACTGAAGGCCACAC | | |
| | AGGTGTCCAAGGGCATCCGGGACAACGAGCGGAGTGGCCGG | | |
| | GCCCGAGTGCACGTGTCTGAGGAGGGCACTGAGCCCGAGGC | | |
| | GATGCTCCAGGTGCTGGGCCCCAAGCCGGCTCTGCCTGCAG | | |
| | GTACCGAGGACACCGCCAAGGAGGATGCGGCCAACCGCAAG | | |
| | CTGGCCAAGCTCTACAAGGTCTCCAATGGTGCAGGGACCAT | | |
| | GTCCGTCTCCCTCGTGGCTGATGAGAACCCCTTCGCCCAGG | | |
| | GGGCCCTGAAGTCAGAGGACTGCTTCATCCTGGACCACGGC | | |
| | AAAGATGGGAAAATCTTTGTCTGGAAAGGCAAGCAGGCAAA | | |
| | CACGGAGGAGAGGAAGGCTGCCCTCAAAACAGCCTCTGACT | | |
| | TCATCACCAAGATGGACTACCCCAAGCAGACTCAGGTCTCG | | |
| | GTCCTTCCTGAGGGCGGTGAGACCCCACTGTTCAAGCAGTT | | |
| | CTTCAAGAACTGGCGGGACCCAGACCAGACAGATGGCCTGG | | |
| | GCTTGTCCTACCTTTCCAGCCATATCGCCAACGTGGAGCGG | | |
| | GTGCCCTTCGACGCCGCCACCCTGCACACCTCCACTGCCAT | | |
| | GGCCGCCCAGCACGGCATGGATGACGATGGCACAGGCCAGA | | |
| | AACAGATCTGGAGAATCGAAGGTTCCAACAAGGTGCCCGTG | | |
| | GACCCTGCCACATATGGACAGTTCTATGGAGGCGACAGCTA | | |
| | CATCATTCTGTACAACTACCGCCATGGTGGCCGCCAGGGGC | | |
| | AGATAATCTATAACTGGCAGGGTGCCCAGTCTACCCAGGAT | | |
| | GAGGTCGCTGCATCTGCCATCCTGACTGCTCAGCTGGATGA | | |
| | GGAGCTGGGAGGTACCCCTGTCCAGAGCCGTGTGGTCCAAG | | |
| | GCAAGGAGCCCGCCCACCTCATGAGCCTGTTTGGTGGGAAG | | |
| | CCCATGATCATCTACAAGGGCGGCACCTCCCGCGAGGGCGG | | |
| | GCAGACAGCCCCTGCCAGCACCCGCCTCTTCCAGGTCCGCG | | |
| | CCAACAGCGCTGGAGCCACCCGGGCTGTTGAGGTATTGCCT | | |
| | AAGGCTGGTGCACTGAACTCCAACGATGCCTTTGTTCTGAA | | |
| | AACCCCCTCAGCCGCCTACCTGTGGGTGGGTACAGGAGCCA | | |
| | GCGAGGCAGAGAAGACGGGGGCCCAGGAGCTGCTCAGGGTG | | |
| | CTGCGGGCCCAACCTGTGCAGGTGGCAGAAGGCAGCGAGCC | | |
| | AGATGGCTTCTGGGAGGCCCTGGGCGGGAAGGCTGCCTACC | | |
| | GCACATCCCCACGGCTGAAGGACAAGAAGATGGATGCCCAT | | |
| | CCTCCTCGCCTCTTTGCCTGCTCCAACAAGATTGGACGTTT | | |
| | TGTGATCGAAGAGGTTCCTGGTGAGCTCATGCAGGAAGACC | | |
| | TGGCAACGGATGACGTCATGCTTCTGGACACCTGGGACCAG | | |
| | GTCTTTGTCTGGGTTGGAAAGGATTCTCAAGAAGAAGAAAA | | |
| | GACAGAAGCCTTGACTTCTGCTAAGCGGTACATCGAGACGG | | |
| | ACCCAGCCAATCGGGATCGGCGGACGCCCATCACCGTGGTG | | |
| | AAGCAAGGCTTTGAGCCTCCCTCCTTTGTGGGCTGGTTCCT | | |
| | TGGCTGGGATGATGATTACTGGTCTGTGGACCCCTTGGACA | | |
| | GGGCCATGGCTGAGCTGGCTGCCTGAGGAGGGGCAGGGCCC | | |
| | ACCCATGTCACCGGTCAGTGCCTTTTGGAACTGTCCTTCCC | | |
| | TCAAAGAGGCCTTAGAGCGAGCAGAGCAGCTCTGCTATGAG | | |
| | TGTGTGTGTGTGTGTGTGTTGTTTCTTTTTTTTTTTTTTAC | | |
| | AGTATCCAAAAATAGCCCTGCAAAAATTCAGAGTCCTTGCA | | |
| | AAATTGTCTAAAATGTCAGTGTTTGGGAAATTAAATCCAAT | | |
| | AAAAACATTTTGAAGTGTG | | |
| LUM | ATTCTTGTCCATAGTGCATCTGCTTTAAGAATTAACGAAAG | U18728 | 62 |
| | CAGTGTCAAGACAGTAAGGATTCAAACCATTTGCCAAAAAT | | |
| | GAGTCTAAGTGCATTTACTCTCTTCCTGGCATTGATTGGTG | | |
| | GTACCAGTGGCCAGTACTATGATTATGATTTTCCCCCATCA | | |
| | ATTTATGGGCAATCATCACCAAACTGTGCACCAGAATGTAA | | |
| | CTGCCCTGAAAGCTACCCAAGTGCCATGTACTGTGATGAGC | | |
| | TGAAATTGAAAAGTGTACCAATGGTGCCTCCTGGAATCAAG | | |
| | TATCTTTACCTTAGGAATAACCAGATTGACCATATTGATGA | | |
| | AAAGGCCTTTGAGAATGTAACTGATCTGCAGTGGCTCATTC | | |
| | TAGATCACAACGTTCTAGAAAACTCCAAGATAAAAGGGAGA | | |
| | GTTTTCTCTAAATTGAAACAACTGAAGAAGCTGCATATAAA | | |
| | CCACAACAACCTGACAGAGTCTGTGGGCCCACTTCCCAAAT | | |
| | CTCTGGAGGATCTGCAGCTTACTCATAACAAGATCACAAAG | | |
| | CTGGGCTCTTTTGAAGGATTGGTAAACCTGACCTTCATCCA | | |
| | TCTCCAGCACAATCGGCTGAAAGAGGATGCTGTTTCAGCTG | | |
| | CTTTTAAAGGTCTTAAATCACTCGAATACCTTGACTTGAGC | | |
| | TTCAATCAGATAGCCAGACTGCCTTCTGGTCTCCCTGTCTC | | |
| | TCTTCTAACTCTCTACTTAGACAACAATAAGATCAGCAACA | | |
| | TCCCTGATGAGTATTTCAAGCGTTTTAATGCATTGCAGTAT | | |
| | CTGCGTTTATCTCACAACGAACTGGCTGATAGTGGAATACC | | |
| | TGGAAATTCTTTCAATGTGTCATCCCTGGTTGAGCTGGATC | | |
| | TGTCCTATAACAAGCTTAAAAACATACCAACTGTCAATGAA | | |
| | AACCTTGAAAACTATTACCTGGAGGTCAATCAACTTGAGAA | | |
| | GTTTGACATAAAGAGCTTCTGCAAGATCCTGGGGCCATTAT | | |
| | CCTACTCCAAGATCAAGCATTTGCGTTTGGATGGCAATCGC | | |
| | ATCTCAGAAACCAGTCTTCCACCGGATATGTATGAATGTCT | | |
| | ACGTGTTGCTAACGAAGTCACTCTTAATTAATATCTGTATC | | |
| | CTGGAACAATATTTTATGGTTATGTTTTTCTGTGTGTCAGT | | |
| | TTTCATAGTATCCATATTTTATTACTGTTTATTACTTCCAT | | |
| | GAATTTTAAAATCTGAGGGAAATGTTTTGTAAACATTTATT | | |
| | TTTTTTAAAGAAAAGATGAAAGGCAGGCCTATTTCATCACA | | |
| | AGAACACACACATATACACGAATAGACATCAAACTCAATGC | | |
| | TTTATTTGTAAATTTAGTGTTTTTTTATTTCTACGGTCAAA | | |
| | TGATGTGCAAAACCTTTTACTGGTTGCATGGAAATCAGCCA | | |
| | AGTTTTATAATCCTTAAATCTTAATGTTCCTCAAAGCTTGG | | |
| | ATTAAATACATATGGATGTTACTCTCTTGCACCAAATTATC | | |
| | TTGATACTTCAAATTTGTCTGGTTAAAAAATAGGTGGTAGA | | |
| | TATTGAGGCCAAGAATATTGCAAAATACATGAACCTTCATG | | |
| | CACTTAAAGAAGTATTTTTAGAATAAGAATTTGCATACTTA | | |
| | CCTAGTGAAACTTTTCTAGAATTATTTTTCACTCTAAGTCA | | |
| | TGTATGTTCCTCTTTGATTATTTGCATGTTATGTTTAATAA | | |
| | GCTACTAGCAAAATAAAACATAGCAAATGGCAAAAAAAAAA | | |
| | AAAAAAA | | |
| C163A | GAATTCTTAGTTGTTTTCTTTAGAAGAACATTTCTAGGGAA | Z22968 | 63 |
| | TAATACAAGAAGATTTAGGAATCATTGAAGTTATAAATCTT | | |
| | TGGAATGAGCAAACTCAGAATGGTGCTACTTGAAGACTCTG | | |
| | GATCTGCTGACTTCAGAAGACATTTTGTCAACCTGAGTCCC | | |
| | TTCACCATTACTGTGGTCTTACTTCTCAGTGCCTGTTTTGT | | |
| | CACCAGTTCTCTTGGAGGAACAGACAAGGAGCTGAGGCTAG | | |
| | TGGATGGTGAAAACAAGTGTAGCGGGAGAGTGGAAGTGAAA | | |
| | GTCCAGGAGGAGTGGGGAACGGTGTGTAATAATGGCTGGAG | | |
| | CATGGAAGCGGTCTCTGTGATTTGTAACCAGCTGGGATGTC | | |
| | CAACTGCTATCAAAGCCCCTGGATGGGCTAATTCCAGTGCA | | |
| | GGTTCTGGACGCATTTGGATGGATCATGTTTCTTGTCGTGG | | |
| | GAATGAGTCAGCTCTTTGGGATTGCAAACATGATGGATGGG | | |
| | GAAAGCATAGTAACTGTACTCACCAACAAGATGCTGGAGTG | | |
| | ACCTGCTCAGATGGATCCAATTTGGAAATGAGGCTGACGCG | | |
| | TGGAGGGAATATGTGTTCTGGAAGAATAGAGATCAAATTCC | | |
| | AAGGACGGTGGGGAACAGTGTGTGATGATAACTTCAACATA | | |
| | GATCATGCATCTGTCATTTGTAGACAACTTGAATGTGGAAG | | |
| | TGCTGTCAGTTTCTCTGGTTCATCTAATTTTGGAGAAGGCT | | |
| | CTGGACCAATCTGGTTTGATGATCTTATATGCAACGGAAAT | | |
| | GAGTCAGCTCTCTGGAACTGCAAACATCAAGGATGGGGAAA | | |
| | GCATAACTGTGATCATGCTGAGGATGCTGGAGTGATTTGCT | | |
| | CAAAGGGAGCAGATCTGAGCCTGAGACTGGTAGATGGAGTC | | |
| | ACTGAATGTTCAGGAAGATTAGAAGTGAGATTCCAAGGAGA | | |
| | ATGGGGGACAATATGTGATGACGGCTGGGACAGTTACGATG | | |
| | CTGCTGTGGCATGCAAGCAACTGGGATGTCCAACTGCCGTC | | |
| | ACAGCCATTGGTCGAGTTAACGCCAGTAAGGGATTTGGACA | | |
| | CATCTGGCTTGACAGCGTTTCTTGCCAGGGACATGAACCTG | | |
| | CTGTCTGGCAATGTAAACACCATGAATGGGGAAAGCATTAT | | |
| | TGCAATCACAATGAAGATGCTGGCGTGACATGTTCTGATGG | | |
| | ATCAGATCTGGAGCTAAGACTTAGAGGTGGAGGCAGCCGCT | | |
| | GTGCTGGGACAGTTGAGGTGGAGATTCAGAGACTGTTAGGG | | |
| | AAGGTGTGTGACAGAGGCTGGGGACTGAAAGAAGCTGATGT | | |
| | GGTTTGCAGGCAGCTGGGATGTGGATCTGCACTCAAAACAT | | |
| | CTTATCAAGTGTACTCCAAAATCCAGGCAACAAACACATGG | | |
| | CTGTTTCTAAGTAGCTGTAACGGAAATGAAACTTCTCTTTG | | |
| | GGACTGCAAGAACTGGCAATGGGGTGGACTTACCTGTGATC | | |
| | ACTATGAAGAAGCCAAAATTACCTGCTCAGCCCACAGGGAA | | |
| | CCCAGACTGGTTGGAGGGGACATTCCCTGTTCTGGACGTGT | | |
| | TGAAGTGAAGCATGGTGACACGTGGGGCTCCATCTGTGATT | | |
| | CGGACTTCTCTCTGGAAGCTGCCAGCGTTCTATGCAGGGAA | | |
| | TTACAGTGTGGCACAGTTGTCTCTATCCTGGGGGGAGCTCA | | |
| | CTTTGGAGAGGGAAATGGACAGATCTGGGCTGAAGAATTCC | | |
| | AGTGTGAGGGACATGAGTCCCATCTTTCACTCTGCCCAGTA | | |
| | GCACCCCGCCCAGAAGGAACTTGTAGCCACAGCAGGGATGT | | |
| | TGGAGTAGTCTGCTCAAGATACACAGAAATTCGCTTGGTGA | | |
| | ATGGCAAGACCCCGTGTGAGGGCAGAGTGGAGCTCAAAACG | | |
| | CTTGGTGCCTGGGGATCCCTCTGTAACTCTCACTGGGACAT | | |
| | AGAAGATGCCCATGTTCTTTGCCAGCAGCTTAAATGTGGAG | | |
| | TTGCCCTTTCTACCCCAGGAGGAGCACGTTTTGGAAAAGGA | | |
| | AATGGTCAGATCTGGAGGCATATGTTTCACTGCACTGGGAC | | |
| | TGAGCAGCACATGGGAGATTGTCCTGTAACTGCTCTAGGTG | | |
| | CTTCATTATGTCCTTCAGAGCAAGTGGCCTCTGTAATCTGC | | |
| | TCAGGAAACCAGTCCCAAACACTGTCCTCGTGCAATTCATC | | |
| | GTCTTTGGGCCCAACAAGGCCTACCATTCCAGAAGAAAGTG | | |
| | CTGTGGCCTGCATAGAGAGTGGTCAACTTCGCCTGGTAAAT | | |
| | GGAGGAGGTCGCTGTGCTGGGAGAGTAGAGATCTATCATGA | | |
| | GGGCTCCTGGGGCACCATCTGTGATGACAGCTGGGACCTGA | | |
| | GTGATGCCCACGTGGTTTGCAGACAGCTGGGCTGTGGAGAG | | |
| | GCCATTAATGCCACTGGTTCTGCTCATTTTGGGGAAGGAAC | | |
| | AGGGCCCATCTGGCTGGATGAGATGAAATGCAATGGAAAAG | | |
| | AATCCCGCATTTGGCAGTGCCATTCACACGGCTGGGGGCAG | | |
| | CAAAATTGCAGGCACAAGGAGGATGCGGGAGTTATCTGCTC | | |
| | AGAATTCATGTCTCTGAGACTGACCAGTGAAGCCAGCAGAG | | |
| | AGGCCTGTGCAGGGCGTCTGGAAGTTTTTTACAATGGAGCT | | |
| | TGGGGCACTGTTGGCAAGAGTAGCATGTCTGAAACCACTGT | | |
| | GGGTGTGGTGTGCAGGCAGCTGGGCTGTGCAGACAAAGGGA | | |
| | AAATCAACCCTGCATCTTTAGACAAGGCCATGTCCATTCCC | | |
| | ATGTGGGTGGACAATGTTCAGTGTCCAAAAGGACCTGACAC | | |
| | GCTGTGGCAGTGCCCATCATCTCCATGGGAGAAGAGACTGG | | |
| | CCAGCCCCTCGGAGGAGACCTGGATCACATGTGACAACAAG | | |
| | ATAAGACTTCAGGAAGGACCCACTTCCTGTTCTGGACGTGT | | |
| | GGAGATCTGGCATGGAGGTTCCTGGGGGACAGTGTGTGATG | | |
| | ACTCTTGGGACTTGGACGATGCTCAGGTGGTGTGTCAACAA | | |
| | CTTGGCTGTGGTCCAGCTTTGAAAGCATTCAAAGAAGCAGA | | |
| | GTTTGGTCAGGGGACTGGACCGATATGGCTCAATGAAGTGA | | |
| | AGTGCAAAGGGAATGAGTCTTCCTTGTGGGATTGTCCTGCC | | |
| | AGACGCTGGGGCCATAGTGAGTGTGGGCACAAGGAAGACGC | | |
| | TGCAGTGAATTGCACAGATATTTCAGTGCAGAAAACCCCAC | | |
| | AAAAAGCCACAACAGGTCGCTCATCCCGTCAGTCATCCTTT | | |
| | ATTGCAGTCGGGATCCTTGGGGTTGTTCTGTTGGCCATTTT | | |
| | CGTCGCATTATTCTTCTTGACTAAAAAGCGAAGACAGAGAC | | |
| | AGCGGCTTGCAGTTTCCTCAAGAGGAGAGAACTTAGTCCAC | | |
| | CAAATTCAATACCGGGAGATGAATTCTTGCCTGAATGCAGA | | |
| | TGATCTGGACCTAATGAATTCCTCAGGAGGCCATTCTGAGC | | |
| | CACACTGAAAAGGAAAATGGGAATTTATAACCCAGTGAGTT | | |
| | CAGCCTTTAAGATACCTTGATGAAGACCTGGACTATTGAAT | | |
| | GGAGCAGAAATTCACCTCTCTCACTGACTATTACAGTTGCA | | |
| | TTTTTATGGAGTTCTTCTTCTCCTAGGATTCCTAAGACTGC | | |
| | TGCTGAATTTATAAAAATTAAGTTTGTGAATGTGACTACTT | | |
| | AGTGGTGTATATGAGACTTTCAAGGGAATTAAATAAATAAA | | |
| | TAAGAATGTTAAA | | |
| PTPRJ | CCCCAGCCGCATGACGCGCGGAGGAGGCAGCGGGACGAGCG | U10886 | 64 |
| | CGGGAGCCGGGACCGGGTAGCCGCGCGCTGGGGGTGGGCGC | | |
| | CGCTCGCTCCGCCCCGCGAAGCCCCTGCGCGCTCAGGGACG | | |
| | CGGCCCCCCCGCGGCAGCCGCGCTAGGCTCCGGCGTGTGGC | | |
| | CGCGGCCGCCGCCGCGCTGCCATGTCTCCGGGCAAGCCGGG | | |
| | GCGGGCGGAGCGGGGACGAGGCGGACCGGCTGGCGGAGGAG | | |
| | GAGGCGAAGGAGACGGCAGGAGGCGGCGACGACGGTGCCCG | | |
| | GGCTCGGGCGCACGGCGGGGCCCGATTCGCGCGTCCGGGGC | | |
| | ACGTTCCAGGGCGCGCGGGGCATGAAGCCGGCGGCGCGGGA | | |
| | GGCGCGGCTGCCTCCGCGCTCGCCCGGGCTGCGCTGGGCGC | | |
| | TGCCGCTGCTGCTGCTGCTGCTGCGCCTGGGCCAGATCCTG | | |
| | TGCGCAGGTGGCACCCCTAGTCCAATTCCTGACCCTTCAGT | | |
| | AGCAACTGTTGCCACAGGGGAAAATGGCATAACGCAGATCA | | |
| | GCAGTACAGCAGAATCCTTTCATAAACAGAATGGAACTGGA | | |
| | ACACCTCAGGTGGAAACAAACACCAGTGAGGATGGTGAAAG | | |
| | CTCTGGAGCCAACGATAGTTTAAGAACACCTGAACAAGGAT | | |
| | CTAATGGGACTGATGGGGCATCTCAAAAAACTCCCAGTAGC | | |
| | ACTGGGCCCAGTCCTGTGTTTGACATTAAAGCTGTTTCCAT | | |
| | CAGTCCAACCAATGTGATCTTAACTTGGAAAAGTAATGACA | | |
| | CAGCTGCTTCTGAGTACAAGTATGTAGTAAAGCATAAGATG | | |
| | GAAAATGAGAAGACAATTACTGTTGTGCATCAACCATGGTG | | |
| | TAACATCACAGGCTTACGTCCAGCGACTTCATATGTATTCT | | |
| | CCATCACTCCAGGAATAGGCAATGAGACTTGGGGAGATCCC | | |
| | AGAGTCATAAAAGTCATCACAGAGCCGATCCCAGTTTCTGA | | |
| | TCTCCGTGTTGCCCTCACGGGTGTGAGGAAGGCTGCTCTCT | | |
| | CCTGGAGCAATGGCAATGGCACCGCCTCCTGCCGGGTTCTT | | |
| | CTTGAAAGCATTGGAAGCCATGAGGAGTTGACTCAAGACTC | | |
| | AAGACTTCAGGTCAATATCTCGGACCTGAAGCCAGGGGTTC | | |
| | AATACAACATCAACCCGTATCTTCTACAATCAAATAAGACA | | |
| | AAGGGAGACCCCTTGGGCACAGAAGGTGGCTTGGATGCCAG | | |
| | CAATACAGAGAGAAGCCGGGCAGGGAGCCCCACCGCCCCTG | | |
| | TGCATGATGAGTCCCTCGTGGGACCTGTGGACCCATCCTCC | | |
| | GGCCAGCAGTCCCGAGACACGGAAGTCCTGCTTGTCGGGTT | | |
| | AGAGCCTGGCACCCGATACAATGCCACCGTTTATTCCCAAG | | |
| | CAGCGAATGGCACAGAAGGACAGCCCCAGGCCATAGAGTTC | | |
| | AGGACAAATGCTATTCAGGTTTTTGACGTCACCGCTGTGAA | | |
| | CATCAGTGCCACAAGCCTGACCCTGATCTGGAAAGTCAGCG | | |
| | ATAACGAGTCGTCATCTAACTATACCTACAAGATACATGTG | | |
| | GCGGGGGAGACAGATTCTTCCAATCTCAACGTCAGTGAGCC | | |
| | TCGCGCTGTCATCCCCGGACTCCGCTCCAGCACCTTCTACA | | |
| | ACATCACAGTGTGTCCTGTCCTAGGTGACATCGAGGGCACG | | |
| | CCGGGCTTCCTCCAAGTGCACACCCCCCCTGTTCCAGTTTC | | |
| | TGACTTCCGAGTGACAGTGGTCAGCACGACGGAGATCGGCT | | |
| | TAGCATGGAGCAGCCATGATGCAGAATCATTTCAGATGCAT | | |
| | ATCACACAGGAGGGAGCTGGCAATTCTCGGGTAGAAATAAC | | |
| | CACCAACCAAAGTATTATCATTGGTGGCTTGTTCCCTGGAA | | |
| | CCAAGTATTGCTTTGAAATAGTTCCAAAAGGACCAAATGGG | | |
| | ACTGAAGGGGCATCTCGGACAGTTTGCAATAGAACTGTTCC | | |
| | CAGTGCAGTGTTTGACATCCACGTGGTCTACGTCACCACCA | | |
| | CGGAGATGTGGCTGGACTGGAAGAGCCCTGACGGTGCTTCC | | |
| | GAGTATGTCTACCATTTAGTCATAGAGTCCAAGCATGGCTC | | |
| | TAACCACACAAGCACGTATGACAAAGCGATTACTCTCCAGG | | |
| | GCCTGATTCCGGGCACCTTATATAACATCACCATCTCTCCA | | |
| | GAAGTGGACCACGTCTGGGGGGACCCCAACTCCACTGCACA | | |
| | GTACACACGGCCCAGCAATGTGTCCAACATTGATGTAAGTA | | |
| | CCAACACCACAGCAGCAACTTTAAGTTGGCAGAACTTTGAT | | |
| | GACGCCTCTCCCACGTACTCCTACTGCCTTCTTATTGAGAA | | |
| | GGCTGGAAATTCCAGCAACGCAACACAAGTAGTCACGGACA | | |
| | TTGGAATTACTGACGCTACAGTCACTGAATTAATACCTGGC | | |
| | TCATCATACACAGTGGAGATCTTTGCACAAGTAGGGGATGG | | |
| | GATCAAGTCACTGGAACCTGGCCGGAAGTCATTCTGTACAG | | |
| | ATCCTGCGTCCATGGCCTCCTTCGACTGCGAAGTGGTCCCC | | |
| | AAAGAGCCAGCCCTGGTTCTCAAATGGACCTGCCCTCCTGG | | |
| | CGCCAATGCAGGCTTTGAGCTGGAGGTCAGCAGTGGAGCCT | | |
| | GGAACAATGCGACCCACCTGGAGAGCTGCTCCTCTGAGAAT | | |
| | GGCACTGAGTATAGAACGGAAGTCACGTATTTGAATTTTTC | | |
| | TACCTCGTACAACATCAGCATCACCACTGTGTCCTGTGGAA | | |
| | AGATGGCAGCCCCCACCCGGAACACCTGCACTACTGGCATC | | |
| | ACAGATCCCCCTCCTCCAGATGGATCCCCTAATATTACATC | | |
| | TGTCAGTCACAATTCAGTAAAGGTCAAGTTCAGTGGATTTG | | |
| | AAGCCAGCCACGGACCCATCAAAGCCTATGCTGTCATTCTC | | |
| | ACCACCGGGGAAGCTGGTCACCCTTCTGCAGATGTCCTGAA | | |
| | ATACACGTATGACGATTTCAAAAAGGGAGCCTCAGATACTT | | |
| | ATGTGACATACCTCATAAGAACAGAAGAAAAGGGACGTTCT | | |
| | CAGAGCTTGTCTGAAGTTTTGAAATATGAAATTGACGTTGG | | |
| | GAATGAGTCAACCACACTTGGTTATTACAATGGGAAGCTGG | | |
| | AACCTCTGGGCTCCTACCGGGCTTGTGTGGCTGGCTTCACC | | |
| | AACATTACCTTCCACCCTCAAAACAAGGGGCTCATTGATGG | | |
| | GGCTGAGAGCTATGTGTCCTTCAGTCGCTACTCAGATGCTG | | |
| | TTTCCTTGCCCCAGGATCCAGGTGTCATCTGTGGAGCGGTT | | |
| | TTTGGCTGTATCTTTGGTGCCCTGGTTATTGTGACTGTGGG | | |
| | AGGCTTCATCTTCTGGAGAAAGAAGAGGAAAGATGCAAAGA | | |
| | ATAATGAAGTGTCCTTTTCTCAAATTAAACCTAAAAAATCT | | |
| | AAGTTAATCAGAGTGGAGAATTTTGAGGCCTACTTCAAGAA | | |
| | GCAGCAAGCTGACTCCAACTGTGGGTTCGCAGAGGAATACG | | |
| | AAGATCTGAAGCTTGTTGGAATTAGTCAACCTAAATATGCA | | |
| | GCAGAACTGGCTGAGAATAGAGGAAAGAATCGCTATAATAA | | |
| | TGTTCTGCCCTATGATATTTCCCGTGTCAAACTTTCGGTCC | | |
| | AGACCCATTCAACGGATGACTACATCAATGCCAACTACATG | | |
| | CCTGGCTACCACTCCAAGAAAGATTTTATTGCCACACAAGG | | |
| | ACCTTTACCGAACACTTTGAAAGATTTTTGGCGTATGGTTT | | |
| | GGGAGAAAAATGTATATGCCATCATTATGTTGACTAAATGT | | |
| | GTTGAACAGGGAAGAACCAAATGTGAGGAGTATTGGCCCTC | | |
| | CAAGCAGGCTCAGGACTATGGAGACATAACTGTGGCAATGA | | |
| | CATCAGAAATTGTTCTTCCGGAATGGACCATCAGAGATTTC | | |
| | ACAGTGAAAAATATCCAGACAAGTGAGAGTCACCCTCTGAG | | |
| | ACAGTTCCATTTCACCTCCTGGCCAGACCACGGTGTTCCCG | | |
| | ACACCACTGACCTGCTCATCAACTTCCGGTACCTCGTTCGT | | |
| | GACTACATGAAGCAGAGTCCTCCCGAATCGCCGATTCTGGT | | |
| | GCATTGCAGTGCTGGGGTCGGAAGGACGGGCACTTTCATTG | | |
| | CCATTGATCGTCTCATCTACCAGATAGAGAATGAGAACACC | | |
| | GTGGATGTGTATGGGATTGTGTATGACCTTCGAATGCATAG | | |
| | GCCTTTAATGGTGCAGACAGAGGACCAGTATGTTTTCCTCA | | |
| | ATCAGTGTGTTTTGGATATTGTCAGATCCCAGAAAGACTCA | | |
| | AAAGTAGATCTTATCTACCAGAACACAACTGCAATGACAAT | | |
| | CTATGAAAACCTTGCGCCCGTGACCACATTTGGAAAGACCA | | |
| | ATGGTTACATCGCCTAATTCCAAAGGAATAACCTTTCTGGA | | |
| | GTGAACCAGACCGTCGCACCCACAGCGAAGGCACATGCCCC | | |
| | GATGTCGACATGTTTTTATATGTCTAATATCTTAATTCTTT | | |
| | GTTCTGTTTTGTGAGAACTAATTTTGAGGGCATGAAGCTGC | | |
| | ATATGATAGATGACAAATTGGGGCTGTCGGGGGCTGTGGAT | | |
| | GGGTGGGGAGCAAATCATCTGCATTCCTGATGACCAATGGG | | |
| | ATGAGGTCACTTTTTTTTTTTTCCCCCTTGAGGATTGCGGA | | |
| | AAACCAGGAAAAGGGATCTATGATTTTTTTTTCCAAAACAA | | |
| | TTTCTTTTTTAAAAAGACTATTTTATATGATTCACATGCTA | | |
| | AAGCCAGGATTGTGTTGGGTTGAATATATTTTAAGTATCAG | | |
| | AGGTCTATTTTTACCTACTGTGTCTTGGAATCTAGCCGATG | | |
| | GAAAATACCTAATTGTGGATGATGATTGCGCAGGGAGGGGT | | |
| | ACGTGGCACCTCTTCCGAATGGGTTTTCTATTTGAACATGT | | |
| | GCCTTTTCTGAATTATGCTTCCACAGGCAAAACTCAGTAGA | | |
| | GATCTATATTTTTGTACTGAATCTCATAATTGGAATATACG | | |
| | GAATATTTAAACAGTAGCTTAGCATCAGAGGTTTGCTTCCT | | |
| | CAGTAACATTTCTGTTCTCATTTGATCAGGGGAGGCCTCTT | | |
| | TGCCCCGGCCCCGCTTCCCCTGCCCCCGTGTGATTTGTGCT | | |
| | CCATTTTTTCTTCCCTTTTCCCTCCCAGTTTTC | | |

### EQUIVALENTS

[0195] The details of one or more embodiments of the invention are set forth in the accompanying description above. Although any methods and materials similar or equivalent to those described herein can be used in the practice or testing of the present invention, the preferred methods and materials are now described. Other features, objects, and advantages of the invention will be apparent from the description and from the claims. In the specification and the appended claims, the singular forms include plural referents unless the context clearly dictates otherwise. Unless defined otherwise, all technical and scientific terms used herein have the same meaning as commonly understood by one of ordinary skill in the art to which this invention belongs. All patents and publications cited in this specification are incorporated by reference.

[0196] The foregoing description has been presented only for the purposes of illustration and is not intended to limit the invention to the precise form disclosed, but by the claims appended hereto.

The application's sequence listing, which the Patent Office published only in electronic form, follows.

SEQUENCE LISTING (85 sequences)

SEQ ID NO: 1 - protein, 428 aa, Homo sapiens
MQELHLLWWALLLGLAQACPEPCDCGEKYGFQIADCAYRDLESVPPGFPANVTTLSLSANRLPGLPEGAFREVPLLQSLWLAHNEIRTVAAGALASLSHLKSLDLSHNLISDFAWSDLHNLSALQLLKMDSNELTFIPRDAFRSLRALRSLQLNHNRLHTLAEGTFTPLTALSHLQINENPFDCTCGIVWLKTWALTTAVSIPEQDNIACTSPHVLKGTPLSRLPPLPCSAPSVQLSYQPSQDGAELRPGFVLALHCDVDGQPAPQLHWHIQIPSGIVEITSPNVGTDGRALPGTPVASSQPRFQAFANGSLLIPDFGKLEEGTYSCLATNELGSAESSVDVALATPGEGGEDTLGRRFHGKAVEGKGCYTVDNEVQPSGPEDNVVIIYLSRAGNPEAAVAEGVPGQLPPGLLLLGQSLLLFFFLTSF

SEQ ID NO: 2 - protein, 364 aa, Homo sapiens
MPYQYPALTPEQKKELSDIAHRIVAPGKGILAADESTGSIAKRLQSIGTENTEENRRFYRQLLLTADDRVNPCIGGVILFHETLYQKADDGRPFPQVIKSKGGVVGIKVDKGVVPLAGTNGETTTQGLDGLSERCAQYKKDGADFAKWRCVLKIGEHTPSALAIMENANVLARYASICQQNGIVPIVEPEILPDGDHDLKRCQYVTEKVLAAVYKALSDHHIYLEGTLLKPNMVTPGHACTQKFSHEEIAMATVTALRRTVPPAVTGITFLSGGQSEEEASINLNAINKCPLLKPWALTFSYGRALQASALKAWGGKKENLKAAQEEYVKRALANSLACQGKYTPSGQAGAAASESLFVSNHAY

SEQ ID NO: 3 - protein, 364 aa, Homo sapiens; identical to SEQ ID NO: 2

SEQ ID NO: 4 - protein, 375 aa, Homo sapiens
MERASCLLLLLLPLVHVSATTPEPCELDDEDFRCVCNFSEPQPDWSEAFQCVSAVEVEIHAGGLNLEPFLKRVDADADPRQYADTVKALRVRRLTVGAAQVPAQLLVGALRVLAYSRLKELTLEDLKITGTMPPLPLEATGLALSSLRLRNVSWATGRSWLAELQQWLKPGLKVLSIAQAHSPAFSCEQVRAFPALTSLDLSDNPGLGERGLMAALCPHKFPAIQNLALRNTGMETPTGVCAALAAAGVQPHSLDLSHNSLRATVNPSAPRCMWSSALNSLNLSFAGLEQVPKGLPAKLRVLDLSCNRLNRAPQPDELPEVDNLTLDGNPFLVPGTALPHEGSMNSGVVPACARSTLSVGVSGTLVLLQGARGFA

SEQ ID NO: 5 - protein, 1754 aa, Homo sapiens
MAPYPCGCHILLLLFCCLAAARANLLNLNWLWFNNEDTSHAATTIPEPQGPLPVQPTADTTTHVTPRNGSTEPATAPGSPEPPSELLEDGQDTPTSAESPDAPEENIAGVGAEILNVAKGIRSFVQLWNDTVPTESLARAETLVLETPVGPLALAGPSSTPQENGTTLWPSRGIPSSPGAHTTEAGTLPAPTPSPPSLGRPWAPLTGPSVPPPSSGRASLSSLLGGAPPWGSLQDPDSQGLSPAAAAPSQQLQRPDVRLRTPLLHPLVMGSLGKHAAPSAFSSGLPGALSQVAVTTLTRDSGAWVSHVANSVGPGLANNSALLGADPEAPAGRCLPLPPSLPVCGHLGISRFWLPNHLHHESGEQVRAGARAWGGLLQTHCHPFLAWFFCLLLVPPCGSVPPPAPPPCCQFCEALQDACWSRLGGGRLPVACASLPTQEDGYCVLIGPAAERISEEVGLLQLLGDPPPQQVTQTDDPDVGLAYVFGPDANSGQVARYHFPSLFFRDFSLLFHIRPATEGPGVLFAITDSAQAMVLLGVKLSGVQDGHQDISLLYTEPGAGQTHTAASFRLPAFVGQWTHLALSVAGGFVALYVDCEEFQRMPLARSSRGLELEPGAGLFVAQAGGADPDKFQGVIAELKVRRDPQVSPMHCLDEEGDDSDGASGDSGSGLGDARELLREETGAALKPRLPAPPPVTTPPLAGGSSTEDSRSEEVEEQTTVASLGAQTLPGSDSVSTWDGSVRTPGGRVKEGGLKGQKGEPGVPGPPGRAGPPGSPCLPGPPGLPCPVSPLGPAGPALQTVPGPQGPPGPPGRDGTPGRDGEPGDPGEDGKPGDTGPQGFPGTPGDVGPKGDKGDPGVGERGPPGPQGPPGPPGPSFRHDKLTFIDMEGSGFGGDLEALRGPRGFPGPPGPPGVPGLPGEPGRFGVNSSDVPGPAGLPGVPGREGPPGFPGLPGPPGPPGREGPPGRTGQKGSLGEAGAPGHKGSKGAPGPAGARGESGLAGAPGPAGPPGPPGPPGPPGPGLPAGFDDMEGSGGPFWSTARSADGPQGPPGLPGLKGDPGVPGLPGAKGEVGADGVPGFPGLPGREGIAGPQGPKGDRGSRGEKGDPGKDGVGQPGLPGPPGPPGPVVYVSEQDGSVLSVPGPEGRPGFAGFPGPAGPKGNLGSKGERGSPGPKGEKGEPGSIFSPDGGALGPAQKGAKGEPGFRGPPGPYGRPGYKGEIGFPGRPGRPGMNGLKGEKGEPGDASLGFGMRGMPGPPGPPGPPGPPGTPVYDSNVFAESSRPGPPGLPGNQGPPGPKGAKGEVGPPGPPGQFPFDFLQLEAEMKGEKGDRGDAGQKGERGEPGGGGFFGSSLPGPPGPPGPPGPRGYPGIPGPKGESIRGQPGPPGPQGPPGIGYEGRQGPPGPPGPPGPPSFPGPHRQTISVPGPPGPPGPPGPPGTMGASSGVRLWATRQAMLGQVHEVPEGWLIFVAEQEELYVRVQNGFRKVQLEARTPLPRGTDNEVAALQPPVVQLHDSNPYPRREHPHPTARPWRADDILASPPRLPEPQPYPGAPHHSSYVHLRPARPTSPPAHSHRDFQPVLHLVALNSPLSGGMRGIRGADFQCFQQARAVGLAGTFRAFLSSRLQDLYSIVRRADRAAVPIVNLKDELLFPSWEALFSGSEGPLKPGARIFSFDGKDVLRHPTWPQKSVWHGSDPNGRRLTESYCETWRTEAPSATGQASSLLGGRLLGQSAASCHHAYIVLCIENSFMTASK

SEQ ID NO: 6 - protein, 1519 aa, Homo sapiens
MAPYPCGCHILLLLFCCLAAARANLLNLNWLWFNNEDTSHAATTIPEPQGPLPVQPTADTTTHVTPRNGSTEPATAPGSPEPPSELLEDGQDTPTSAESPDAPEENIAGVGAEILNVAKGIRSFVQLWNDTVPTESLARAETLVLETPVGPLALAGPSSTPQENGTTLWPSRGIPSSPGAHTTEAGTLPAPTPSPPSLGRPWAPLTGPSVPPPSSERISEEVGLLQLLGDPPPQQVTQTDDPDVGLAYVFGPDANSGQVARYHFPSLFFRDFSLLFHIRPATEGPGVLFAITDSAQAMVLLGVKLSGVQDGHQDISLLYTEPGAGQTHTAASFRLPAFVGQWTHLALSVAGGFVALYVDCEEFQRMPLARSSRGLELEPGAGLFVAQAGGADPDKFQGVIAELKVRRDPQVSPMHCLDEEGDDSDGASGDSGSGLGDARELLREETGAALKPRLPAPPPVTTPPLAGGSSTEDSRSEEVEEQTTVASLGAQTLPGSDSVSTWDGSVRTPGGRVKEGGLKGQKGEPGVPGPPGRAGPPGSPCLPGPPGLPCPVSPLGPAGPALQTVPGPQGPPGPPGRDGTPGRDGEPGDPGEDGKPGDTGPQGFPGTPGDVGPKGDKGDPGVGERGPPGPQGPPGPPGPSFRHDKLTFIDMEGSGFGGDLEALRGPRGFPGPPGPPGVPGLPGEPGRFGVNSSDVPGPAGLPGVPGREGPPGFPGLPGPPGPPGREGPPGRTGQKGSLGEAGAPGHKGSKGAPGPAGARGESGLAGAPGPAGPPGPPGPPGPPGPGLPAGFDDMEGSGGPFWSTARSADGPQGPPGLPGLKGDPGVPGLPGAKGEVGADGVPGFPGLPGREGIAGPQGPKGDRGSRGEKGDPGKDGVGQPGLPGPPGPPGPVVYVSEQDGSVLSVPGPEGRPGFAGFPGPAGPKGNLGSKGERGSPGPKGEKGEPGSIFSPDGGALGPAQKGAKGEPGFRGPPGPYGRPGYKGEIGFPGRPGRPGMNGLKGEKGEPGDASLGFGMRGMPGPPGPPGPPGPPGTPVYDSNVFAESSRPGPPGLPGNQGPPGPKGAKGEVGPPGPPGQFPFDFLQLEAEMKGEKGDRGDAGQKGERGEPGGGGFFGSSLPGPPGPPGPPGPRGYPGIPGPKGESIRGQPGPPGPQGPPGIGYEGRQGPPGPPGPPGPPSFPGPHRQTISVPGPPGPPGPPGPPGTMGASSGVRLWATRQAMLGQVHEVPEGWLIFVAEQEELYVRVQNGFRKVQLEARTPLPRGTDNEVAALQPPVVQLHDSNPYPRREHPHPTARPWRADDILASPPRLPEPQPYPGAPHHSSYVHLRPARPTSPPAHSHRDFQPVLHLVALNSPLSGGMRGIRGADFQCFQQARAVGLAGTFRAFLSSRLQDLYSIVRRADRAAVPIVNLKDELLFPSWEALFSGSEGPLKPGARIFSFDGKDVLRHPTWPQKSVWHGSDPNGRRLTESYCETWRTEAPSATGQASSLLGGRLLGQSAASCHHAYIVLCIENSFMTASK

SEQ ID NO: 7 - protein, 1339 aa, Homo sapiens
MAPRCPWPWPRRRRLLDVLAPLVLLLGVRAASAEPERISEEVGLLQLLGDPPPQQVTQTDDPDVGLAYVFGPDANSGQVARYHFPSLFFRDFSLLFHIRPATEGPGVLFAITDSAQAMVLLGVKLSGVQDGHQDISLLYTEPGAGQTHTAASFRLPAFVGQWTHLALSVAGGFVALYVDCEEFQRMPLARSSRGLELEPGAGLFVAQAGGADPDKFQGVIAELKVRRDPQVSPMHCLDEEGDDSDGASGDSGSGLGDARELLREETGAALKPRLPAPPPVTTPPLAGGSSTEDSRSEEVEEQTTVASLGAQTLPGSDSVSTWDGSVRTPGGRVKEGGLKGQKGEPGVPGPPGRAGPPGSPCLPGPPGLPCPVSPLGPAGPALQTVPGPQGPPGPPGRDGTPGRDGEPGDPGEDGKPGDTGPQGFPGTPGDVGPKGDKGDPGVGERGPPGPQGPPGPPGPSFRHDKLTFIDMEGSGFGGDLEALRGPRGFPGPPGPPGVPGLPGEPGRFGVNSSDVPGPAGLPGVPGREGPPGFPGLPGPPGPPGREGPPGRTGQKGSLGEAGAPGHKGSKGAPGPAGARGESGLAGAPGPAGPPGPPGPPGPPGPGLPAGFDDMEGSGGPFWSTARSADGPQGPPGLPGLKGDPGVPGLPGAKGEVGADGVPGFPGLPGREGIAGPQGPKGDRGSRGEKGDPGKDGVGQPGLPGPPGPPGPVVYVSEQDGSVLSVPGPEGRPGFAGFPGPAGPKGNLGSKGERGSPGPKGEKGEPGSIFSPDGGALGPAQKGAKGEPGFRGPPGPYGRPGYKGEIGFPGRPGRPGMNGLKGEKGEPGDASLGFGMRGMPGPPGPPGPPGPPGTPVYDSNVFAESSRPGPPGLPGNQGPPGPKGAKGEVGPPGPPGQFPFDFLQLEAEMKGEKGDRGDAGQKGERGEPGGGGFFGSSLPGPPGPPGPPGPRGYPGIPGPKGESIRGQPGPPGPQGPPGIGYEGRQGPPGPPGPPGPPSFPGPHRQTISVPGPPGPPGPPGPPGTMGASSGVRLWATRQAMLGQVHEVPEGWLIFVAEQEELYVRVQNGFRKVQLEARTPLPRGTDNEVAALQPPVVQLHDSNPYPRREHPHPTARPWRADDILASPPRLPEPQPYPGAPHHSSYVHLRPARPTSPPAHSHRDFQPVLHLVALNSPLSGGMRGIRGADFQCFQQARAVGLAGTFRAFLSSRLQDLYSIVRRADRAAVPIVNLKDELLFPSWEALFSGSEGPLKPGARIFSFDGKDVLRHPTWPQKSVWHGSDPNGRRLTESYCETWRTEAPSATGQASSLLGGRLLGQSAASCHHAYIVLCIENSFMTASK

SEQ ID NO: 8 - protein, 291 aa, Homo sapiens
MQRARPTLWAAALTLLVLLRGPPVARAGASSAGLGPVVRCEPCDARALAQCAPPPAVCAELVREPGCGCCLTCALSEGQPCGIYTERCGSGLRCQPSPDEARPLQALLDGRGLCVNASAVSRLRAYLLPAPPAPGNASESEEDRSAGSVESPSVSSTHRVSDPKFHPLHSKIIIIKKGHAKDSQRYKVDYESQSTDTQNFSSESKRETEYGPCRREMEDTLNHLKFLNVLSPRGVHIPNCDKKGFYKKKQCRPSKGRKRGFCWCVDKYGQPLPGYTTKGKEDVHCYSMQSK

SEQ ID NO: 9 - protein, 297 aa, Homo sapiens
MQRARPTLWAAALTLLVLLRGPPVARAGASSAGLGPVVRCEPCDARALAQCAPPPAVCAELVREPGCGCCLTCALSEGQPCGIYTERCGSGLRCQPSPDEARPLQALLDGRGLCVNASAVSRLRAYLLPAPPAPGEPPAPGNASESEEDRSAGSVESPSVSSTHRVSDPKFHPLHSKIIIIKKGHAKDSQRYKVDYESQSTDTQNFSSESKRETEYGPCRREMEDTLNHLKFLNVLSPRGVHIPNCDKKGFYKKKQCRPSKGRKRGFCWCVDKYGQPLPGYTTKGKEDVHCYSMQSK

SEQ ID NO: 10 - protein, 1170 aa, Homo sapiens
MGLAWGLGVLFLMHVCGTNRIPESGGDNSVFDIFELTGAARKGSGRRLVKGPDPSSPAFRIEDANLIPPVPDDKFQDLVDAVRAEKGFLLLASLRQMKKTRGTLLALERKDHSGQVFSVVSNGKAGTLDLSLTVQGKQHVVSVEEALLATGQWKSITLFVQEDRAQLYIDCEKMENAELDVPIQSVFTRDLASIARLRIAKGGVNDNFQGVLQNVRFVFGTTPEDILRNKGCSSSTSVLLTLDNNVVNGSSPAIRTNYIGHKTKDLQAICGISCDELSSMVLELRGLRTIVTTLQDSIRKVTEENKELANELRRPPLCYHNGVQYRNNEEWTVDSCTECHCQNSVTICKKVSCPIMPCSNATVPDGECCPRCWPSDSADDGWSPWSEWTSCSTSCGNGIQQRGRSCDSLNNRCEGSSVQTRTCHIQECDKRFKQDGGWSHWSPWSSCSVTCGDGVITRIRLCNSPSPQMNGKPCEGEARETKACKKDACPINGGWGPWSPWDICSVTCGGGVQKRSRLCNNPTPQFGGKDCVGDVTENQICNKQDCPIDGCLSNPCFAGVKCTSYPDGSWKCGACPPGYSGNGIQCTDVDECKEVPDACFNHNGEHRCENTDPGYNCLPCPPRFTGSQPFGQGVEHATANKQVCKPRNPCTDGTHDCNKNAKCNYLGHYSDPMYRCECKPGYAGNGIICGEDTDLDGWPNENLVCVANATYHCKKDNCPNLPNSGQEDYDKDGIGDACDDDDDNDKIPDDRDNCPFHYNPAQYDYDRDDVGDRCDNCPYNHNPDQADTDNNGEGDACAADIDGDGILNERDNCQYVYNVDQRDTDMDGVGDQCDNCPLEHNPDQLDSDSDRIGDTCDNNQDIDEDGHQNNLDNCPYVPNANQADHDKDGKGDACDHDDDNDGIPDDKDNCRLVPNPDQKDSDGDGRGDACKDDFDHDSVPDIDDICPENVDISETDFRRFQMIPLDPKGTSQNDPNWVVRHQGKELVQTVNCDPGLAVGYDEFNAVDFSGTFFINTERDDDYAGFVFGYQSSSRFYVVMWKQVTQSYWDTNPTRAQGYSGLSVKVVNSTTGPGEHLRNALWHTGNTPGQVRTLWHDPRHIGWKDFTAYRWRLSHRPKTGFIRVVMYEGKKIMADSGPIYDKTYAGGRLGLFVFSQEMVFFSDLKYECRDP

SEQ ID NO: 11 - protein, 1085 aa, Homo sapiens
MGLAWGLGVLFLMHVCGTLLALERKDHSGQVFSVVSNGKAGTLDLSLTVQGKQHVVSVEEALLATGQWKSITLFVQEDRAQLYIDCEKMENAELDVPIQSVFTRDLASIARLRIAKGGVNDNFQGVLQNVRFVFGTTPEDILRNKGCSSSTSVLLTLDNNVVNGSSPAIRTNYIGHKTKDLQAICGISCDELSSMVLELRGLRTIVTTLQDSIRKVTEENKELANELRRPPLCYHNGVQYRNNEEWTVDSCTECHCQNSVTICKKVSCPIMPCSNATVPDGECCPRCWPSDSADDGWSPWSEWTSCSTSCGNGIQQRGRSCDSLNNRCEGSSVQTRTCHIQECDKRFKQDGGWSHWSPWSSCSVTCGDGVITRIRLCNSPSPQMNGKPCEGEARETKACKKDACPINGGWGPWSPWDICSVTCGGGVQKRSRLCNNPTPQFGGKDCVGDVTENQICNKQDCPIDGCLSNPCFAGVKCTSYPDGSWKCGACPPGYSGNGIQCTDVDECKEVPDACFNHNGEHRCENTDPGYNCLPCPPRFTGSQPFGQGVEHATANKQVCKPRNPCTDGTHDCNKNAKCNYLGHYSDPMYRCECKPGYAGNGIICGEDTDLDGWPNENLVCVANATYHCKKDNCPNLPNSGQEDYDKDGIGDACDDDDDNDKIPDDRDNCPFHYNPAQYDYDRDDVGDRCDNCPYNHNPDQADTDNNGEGDACAADIDGDGILNERDNCQYVYNVDQRDTDMDGVGDQCDNCPLEHNPDQLDSDSDRIGDTCDNNQDIDEDGHQNNLDNCPYVPNANQADHDKDGKGDACDHDDDNDGIPDDKDNCRLVPNPDQKDSDGDGRGDACKDDFDHDSVPDIDDICPENVDISETDFRRFQMIPLDPKGTSQNDPNWVVRHQGKELVQTVNCDPGLAVGYDEFNAVDFSGTFFINTERDDDYAGFVFGYQSSSRFYVVMWKQVTQSYWDTNPTRAQGYSGLSVKVVNSTTGPGEHLRNALWHTGNTPGQVRTLWHDPRHIGWKDFTAYRWRLSHRPKTGFIRVVMYEGKKIMADSGPIYDKTYAGGRLGLFVFSQEMVFFSDLKYECRDP

SEQ ID NO: 12 - protein, 175 aa, Homo sapiens
MSSQIRQNYSTDVEAAVNSLVNLYLQASYTYLSLGFYFDRDDVALEGVSHFFRELAEEKREGYERLLKMQNQRGGRALFQDIKKPAEDEWGKTPDAMKAAMALEKKLNQALLDLHALGSARTDPHLCDFLETHFLDEEVKLIKKMGDHLTNLHRLGGPEAGLGEYLFERLTLKHD

SEQ ID NO: 13 - protein, 683 aa, Homo sapiens
MALFVRLLALALALALGPAATLAGPAKSPYQLVLQHSRLRGRQHGPNVCAVQKVIGTNRKYFTNCKQWYQRKICGKSTVISYECCPGYEKVPGEKGCPAALPLSNLYETLGVVGSTTTQLYTDRTEKLRPEMEGPGSFTIFAPSNEAWASLPAEVLDSLVSNVNIELLNALRYHMVGRRVLTDELKHGMTLTSMYQNSNIQIHHYPNGIVTVNCARLLKADHHATNGVVHLIDKVISTITNNIQQIIEIEDTFETLRAAVAASGLNTMLEGNGQYTLLAPTNEAFEKIPSETLNRILGDPEALRDLLNNHILKSAMCAEAIVAGLSVETLEGTTLEVGCSGDMLTINGKAIISNKDILATNGVIHYIDELLIPDSAKTLFELAAESDVSTAIDLFRQAGLGNHLSGSERLTLLAPLNSVFKDGTPPIDAHTRNLLRNHIIKDQLASKYLYHGQTLETLGGKKLRVFVYRNSLCIENSCIAAHDKRGRYGTLFTMDRVLTPPMGTVMDVLKGDNRFSMLVAAIQSAGLTETLNREGVYTVFAPTNEAFRALPPRERSRLLGDAKELANILKYHIGDEILVSGGIGALVRLKSLQGDKLEVSLKNNVVSVNKEPVAEPDIMATNGVVHVITNVLQPPANRPQERGDELADSALEIFKQASAFSRASQRSVRLAPVYQKLLERMKH

SEQ ID NO: 14 - protein, 803 aa, Homo sapiens
MRALWVLGLCCVLLTFGSVRADDEVDVDGTVEEDLGKSREGSRTDDEVVQREEEAIQLDGLNASQIRELREKSEKFAFQAEVNRMMKLIINSLYKNKEIFLRELISNASDALDKIRLISLTDENALSGNEELTVKIKCDKEKNLLHVTDTGVGMTREELVKNLGTIAKSGTSEFLNKMTEAQEDGQSTSELIGQFGVGFYSAFLVADKVIVTSKHNNDTQHIWESDSNEFSVIADPRGNTLGRGTTITLVLKEEASDYLELDTIKNLVKKYSQFINFPIYVWSSKTETVEEPMEEEEAAKEEKEESDDEAAVEEEEEEKKPKTKKVEKTVWDWELMNDIKPIWQRPSKEVEEDEYKAFYKSFSKESDDPMAYIHFTAEGEVTFKSILFVPTSAPRGLFDEYGSKKSDYIKLYVRRVFITDDFHDMMPKYLNFVKGVVDSDDLPLNVSRETLQQHKLLKVIRKKLVRKTLDMIKKIADDKYNDTFWKEFGTNIKLGVIEDHSNRTRLAKLLRFQSSHHPTDITSLDQYVERMKEKQDKIYFMAGSSRKEAESSPFVERLLKKGYEVIYLTEPVDEYCIQALPEFDGKRFQNVAKEGVKFDESEKTKESREAVEKEFEPLLNWMKDKALKDKIEKAVVSQRLTESPCALVASQYGWSGNMERIMKAQAYQTGKDISTNYYASQKKTFEINPRHPLIRDMLRRIKEDEDDKTVLDLAVVLFETATLRSGYLLPDTKAYGDRIERMLRLSLNIDPDAKVEEEPEEEPEETAEDTTEDTEQDEDEEMDVGTDEEEETAKESTAEKDEL

SEQ ID NO: 15 - protein, 654 aa, Homo sapiens
MKLSLVAAMLLLLSAARAEEEDKKEDVGTVVGIDLGTTYSCVGVFKNGRVEIIANDQGNRITPSYVAFTPEGERLIGDAAKNQLTSNPENTVFDAKRLIGRTWNDPSVQQDIKFLPFKVVEKKTKPYIQVDIGGGQTKTFAPEEISAMVLTKMKETAEAYLGKKVTHAVVTVPAYFNDAQRQATKDAGTIAGLNVMRIINEPTAAAIAYGLDKREGEKNILVFDLGGGTFDVSLLTIDNGVFEVVATNGDTHLGGEDFDQRVMEHFIKLYKKKTGKDVRKDNRAVQKLRREVEKAKRALSSQHQARIEIESFYEGEDFSETLTRAKFEELNMDLFRSTMKPVQKVLEDSDLKKSDIDEIVLVGGSTRIPKIQQLVKEFFNGKEPSRGINPDEAVAYGAAVQAGVLSGDQDTGDLVLLDVCPLTLGIETVGGVMTKLIPRNTVVPTKKSQIFSTASDNQPTVTIKVYEGERPLTKDNHLLGTFDLTGIPPAPRGVPQIEVTFEIDVNGILRVTAEDKGTGNKNKITITNDQNRLTPEEIERMVNDAEKFAEEDKKLKERIDTRNELESYAYSLKNQIGDKEKLGGKLSSEDKETMEKAVEEKIEWLESHQDADIEDFKAKKKELEEIVQPIISKLYGSAGPPPTGEEDTAEKDEL

SEQ ID NO: 16 - protein, 585 aa, Homo sapiens
MTPPRLFWVWLLVAGTQGVNDGDMRLADGGATNQGRVEIFYRGQWGTVCDNLWDLTDASVVCRALGFENATQALGRAAFGQGSGPIMLDEVQCTGTEASLADCKSLGWLKSNCRHERDAGVVCTNETRSTHTLDLSRELSEALGQIFDSQRGCDLSISVNVQGEDALGFCGHTVILTANLEAQALWKEPGSNVTMSVDAECVPMVRDLLRYFYSRRIDITLSSVKCFHKLASAYGARQLQGYCASLFAILLPQDPSFQMPLDLYAYAVATGDALLEKLCLQFLAWNFEALTQAEAWPSVPTDLLQLLLPRSDLAVPSELALLKAVDTWSWGERASHEEVEGLVEKIRFPMMLPEELFELQFNLSLYWSHEALFQKKTLQALEFHTVPFQLLARYKGLNLTEDTYKPRIYTSPTWSAFVTDSSWSARKSQLVYQSRRGPLVKYSSDYFQAPSDYRYYPYQSFQTPQHPSFLFQDKRVSWSLVYLPTIQSCWNYGFSCSSDELPVLGLTKSGGSDRTIAYENKALMLCEGLFVADVTDFEGWKAAIPSALDTNSSKSTSSFPCPAGHFNGFRTVIRPFYLTNSSGVD

SEQ ID NO: 17 - protein, 1337 aa, Homo sapiens
MKPAAREARLPPRSPGLRWALPLLLLLLRLGQILCAGGTPSPIPDPSVATVATGENGITQISSTAESFHKQNGTGTPQVETNTSEDGESSGANDSLRTPEQGSNGTDGASQKTPSSTGPSPVFDIKAVSISPTNVILTWKSNDTAASEYKYVVKHKMENEKTITVVHQPWCNITGLRPATSYVFSITPGIGNETWGDPRVIKVITEPIPVSDLRVALTGVRKAALSWSNGNGTASCRVLLESIGSHEELTQDSRLQVNISGLKPGVQYNINPYLLQSNKTKGDPLGTEGGLDASNTERSRAGSPTAPVHDESLVGPVDPSSGQQSRDTEVLLVGLEPGTRYNATVYSQAANGTEGQPQAIEFRTNAIQVFDVTAVNISATSLTLIWKVSDNESSSNYTYKIHVAGETDSSNLNVSEPRAVIPGLRSSTFYNITVCPVLGDIEGTPGFLQVHTPPVPVSDFRVTVVSTTEIGLAWSSHDAESFQMHITQEGAGNSRVEITTNQSIIIGGLFPGTKYCFEIVPKGPNGTEGASRTVCNRTVPSAVFDIHVVYVTTTEMWLDWKSPDGASEYVYHLVIESKHGSNHTSTYDKAITLQGLIPGTLYNITISPEVDHVWGDPNSTAQYTRPSNVSNIDVSTNTTAATLSWQNFDDASPTYSYCLLIEKAGNSSNATQVVTDIGITDATVTELIPGSSYTVEIFAQVGDGIKSLEPGRKSFCTDPASMASFDCEVVPKEPALVLKWTCPPGANAGFELEVSSGAWNNATHLESCSSENGTEYRTEVTYLNFSTSYNISITTVSCGKMAAPTRNTCTTGITDPPPPDGSPNITSVSHNSVKVKFSGFEASHGPIKAYAVILTTGEAGHPSADVLKYTYEDFKKGASDTYVTYLIRTEEKGRSQSLSEVLKYEIDVGNESTTLGYYNGKLEPLGSYRACVAGFTNITFHPQNKGLIDGAESYVSFSRYSDAVSLPQDPGVICGAVFGCIFGALVIVTVGGFIFWRKKRKDAKNNEVSFSQIKPKKSKLIRVENFEAYFKKQQADSNCGFAEEYEDLKLVGISQPKYAAELAENRGKNRYNNVLPYDISRVKLSVQTHSTDDYINANYMPGYHSKKDFIATQGPLPNTLKDFWRMVWEKNVYAIIMLTKCVEQGRTKCEEYWPSKQAQDYGDITVAMTSEIVLPEWTIRDFTVKNIQTSESHPLRQFHFTSWPDHGVPDTTDLLINFRYLVRDYMKQSPPESPILVHCSAGVGRTGTFIAIDRLIYQIENENTVDVYGIVYDLRMHRPLMVQTEDQYVFLNQCVLDIVRSQKDSKVDLIYQNTTAMTIYENLAPVTTFGKTNGYIA

SEQ ID NO: 18 - protein, 539 aa, Homo sapiens
MKPAAREARLPPRSPGLRWALPLLLLLLRLGQILCAGGTPSPIPDPSVATVATGENGITQISSTAESFHKQNGTGTPQVETNTSEDGESSGANDSLRTPEQGSNGTDGASQKTPSSTGPSPVFDIKAVSISPTNVILTWKSNDTAASEYKYVVKHKMENEKTITVVHQPWCNITGLRPATSYVFSITPGIGNETWGDPRVIKVITEPIPVSDLRVALTGVRKAALSWSNGNGTASCRVLLESIGSHEELTQDSRLQVNISGLKPGVQYNINPYLLQSNKTKGDPLGTEGGLDASNTERSRAGSPTAPVHDESLVGPVDPSSGQQSRDTEVLLVGLEPGTRYNATVYSQAANGTEGQPQAIEFRTNAIQVFDVTAVNISATSLTLIWKVSDNESSSNYTYKIHVAGETDSSNLNVSEPRAVIPGLRSSTFYNITVCPVLGDIEGTPGFLQVHTPPVPVSDFRVTVVSTTEIGLAWSSHDAESFQMHITQEGAGNSRVEITTNQSIIIGGLFPGTKYCFEIVPKGPNGTEGASRTVCNRTG

SEQ ID NO: 19 - protein, 4242 aa, Homo sapiens
MMPAQYALTSSLVLLVLLSTARAGPFSSRSNVTLPAPRPPPQPGGHTVGAGVGSPSSQLYEHTVEGGEKQVVFTHRINLPPSTGCGCPPGTEPPVLASEVQALRVRLEILEELVKGLKEQCTGGCCPASAQAGTGQTDVRTLCSLHGVFDLSRCTCSCEPGWGGPTCSDPTDAEIPPSSPPSASGSCPDDCNDQGRCVRGRCVCFPGYTGPSCGWPSCPGDCQGRGRCVQGVCVCRAGFSGPDCSQRSCPRGCSQRGRCEGGRCVCDPGYTGDDCGMRSCPRGCSQRGRCENGRCVCNPGYTGEDCGVRSCPRGCSQRGRCKDGRCVCDPGYTGEDCGTRSCPWDCGEGGRCVDGRCVCWPGYTGEDCSTRTCPRDCRGRGRCEDGECICDTGYSGDDCGVRSCPGDCNQRGRCEDGRCVCWPGYTGTDCGSRACPRDCRGRGRCENGVCVCNAGYSGEDCGVRSCPGDCRGRGRCESGRCMCWPGYTGRDCGTRACPGDCRGRGRCVDGRCVCNPGFTGEDCGSRRCPGDCRGHGLCEDGVCVCDAGYSGEDCSTRSCPGGCRGRGQCLDGRCVCEDGYSGEDCGVRQCPNDCSQHGVCQDGVCICWEGYVSEDCSIRTCPSNCHGRGRCEEGRCLCDPGYTGPTCATRMCPADCRGRGRCVQGVCLCHVGYGGEDCGQEEPPASACPGGCGPRELCRAGQCVCVEGFRGPDCAIQTCPGDCRGRGECHDGSCVCKDGYAGEDCGEEVPTIEGMRMHLLEETTVRTEWTPAPGPVDAYEIQFIPTTEGASPPFTARVPSSASAYDQRGLAPGQEYQVTVRALRGTSWGLPASKTITTMIDGPQDLRVVAVTPTTLELGWLRPQAEVDRFVVSYVSAGNQRVRLEVPPEADGTLLTDLMPGVEYVVTVTAERGRAVSYPASVRANTGSSPLGLLGTTDEPPPSGPSTTQGAQAPLLQQRPQELGELRVLGRDETGRLRVVWTAQPDTFAYFQLRMRVPEGPGAHEEVLPGDVRQALVPPPPPGTPYELSLHGVPPGGKPSDPIIYQGIMDKDEEKPGKSSGPPRLGELTVTDRTSDSLLLRWTVPEGEFDSFVIQYKDRDGQPQVVPVEGPQRSAVITSLDPGRKYKFVLYGFVGKKRHGPLVAEAKILPQSDPSPGTPPHLGNLWVTDPTPDSLHLSWTVPEGQFDTFMVQYRDRDGRPQVVPVEGPERSFVVSSLDPDHKYRFTLFGIANKKRYGPLTADGTTAPERKEEPPRPEFLEQPLLGELTVTGVTPDSLRLSWTVAQGPFDSFMVQYKDAQGQPQAVPVAGDENEVTVPGLDPDRKYKMNLYGLRGRQRVGPESVVAKTAPQEDVDETPSPTELGTEAPESPEEPLLGELTVTGSSPDSLSLFWTVPQGSFDSFTVQYKDRDGRPRAVRVGGKESEVTVGGLEPGHKYKMHLYGLHEGQRVGPVSAVGVTAPQQEETPPATESPLEPRLGELTVTDVTPNSVGLSWTVPEGQFDSFIVQYKDKDGQPQVVPVAADQREVTVYNLEPERKYKMNMYGLHDGQRMGPLSVVIVTAPLPPAPATEASKPPLEPRLGELTVTDITPDSVGLSWTVPEGEFDSFVVQYKDRDGQPQVVPVAADQREVTIPDLEPSRKYKFLLFGIQDGKRRSPVSVEAKTVARGDASPGAPPRLGELWVTDPTPDSLRLSWTVPEGQFDSFVVQFKDKDGPQVVPVEGHERSVTVTPLDAGRKYRFLLYGLLGKKRHGPLTADGTTEARSAMDDTGTKRPPKPRLGEELQVTTVTQNSVGLSWTVPEGQFDSFVVQYKDRDGQPQVVPVEGSLREVSVPGLDPAHRYKLLLYGLHHGKRVGPISAVAITAGREETETETTAPTPPAPEPHLGELTVEEATSHTLHLSWMVTEGEFDSFEIQYTDRDGQLQMVRIGGDRNDITLSGLESDHRYLVTLYGFSDGKHVGPVHVEALTVPEEEKPSEPPTATPEPPIKPRLGELTVTDATPDSLSLSWTVPEGQFDHFLVQYRNGDGQPKAVRVPGHEEGVTISGLEPDHKYKMNLYGFHGGQRMGPVSVVGVTAAEEETPSPTEPSMEAPEPAEEPLLGELTVTGSSPDSLSLSWTVPQGRFDSFTVQYKDRDGRPQVVRVGGEESEVTVGGLEPGRKYKMHLYGLHEGRRVGPVSAVGVTAPEEESPDAPLAKLRLGQMTVRDITSDSLSLSWTVPEGQFDHFLVQFKNGDGQPKAVRVPGHEDGVTISGLEPDHKYKMNLYGFHGGQRVGPVSAVGLTAPGKDEEMAPASTEPPTPEPPIKPRLEELTVTDATPDSLSLSWTVPEGQFDHFLVQYKNGDGQPKATRVPGHEDRVTISGLEPDNKYKMNLYGFHGGQRVGPVSAIGVTAAEEETPSPTEPSMEAPEPPEEPLLGELTVTGSSPDSLSLSWTVPQGRFDSFTVQYKDRDGRPQVVRVGGEESEVTVGGLEPGRKYKMHLYGLHEGRRVGPVSTVGVTAPQEDVDETPSPTEPGTEAPGPPEEPLLGELTVTGSSPDSLSLSWTVPQGRFDSFTVQYKDRDGRPQAVRVGGQESKVTVRGLEPGRKYKMHLYGLHEGRRLGPVSAVGVTEDEAETTQAVPTMTPEPPIKPRLGELTMTDATPDSLSLSWTVPEGQFDHFLVQYRNGDGQPKAVRVPGHEDGVTISGLEPDHKYKMNLYGFHGGQRVGPISVIGVTAAEEETPSPTELSTEAPEPPEEPLLGELTVTGSSPDSLSLSWTIPQGHFDSFTVQYKDRDGRPQVMRVRGEESEVTVGGLEPGRKYKMHLYGLHEGRRVGPVSTVGVTEDEAETTQAVPTTTPEPPNKPRLGELTVTDATPDSLSLSWMVPEGQFDHFLVQYRNGDGQPKVVRVPGHEDGVTISGLEPDHKYKMNLYGFHGGQRVGPISVIGVTAAEEETPAPTEPSTEAPEPPEEPLLGELTVTGSSPDSLSLSWTIPQGRFDSFTVQYKDRDGRPQVVRVRGEESEVTVGGLEPGCKYKMHLYGLHEGQRVGPVSAVGVTAPKDEAETTQAVPTMTPEPPIKPRLGELTVTDATPDSLSLSWMVPEGQFDHFLVQYRNGDGQPKAVRVPGHEDGVTISGLEPDHKYKMNLYGFHGGQRVGPVSAIGVTEEETPSPTEPSTEAPEAPEEPLLGELTVTGSSPDSLSLSWTVPQGRFDSFTVQYKDRDGQPQVVRVRGEESEVTVGGLEPGRKYKMHLYGLHEGQRVGPVSTVGITAPLPTPLPVEPRLGELAVAAVTSDSVGLSWTVAQGPFDSFLVQYRDAQGQPQAVPVSGDLRAVAVSGLDPARKYKFLLFGLQNGKRHGPVPVEARTAPDTKPSPRLGELTVTDATPDSVGLSWTVPEGEFDSFVVQYKDKDGRLQVVPVAANQREVTVQGLEPSRKYRFLLYGLSGRKRLGPISADSTTAPLEKELPPHLGELTVAEETSSSLRLSWTVAQGPFDSFVVQYRDTDGQPRAVPVAADQRTVTVEDLEPGKKYKFLLYGLLGGKRLGPVSALGMTAPEEDTPAPELAPEAPEPPEEPRLGVLTVTDTTPDSMRLSWSVAQGPFDSFVVQYEDTNGQPQALLVDGDQSKILISGLEPSTPYRFLLYGLHEGKRLGPLSAEGTTGLAPAGQTSEESRPRLSQLSVTDVTTSSLRLNWEAPPGAFDSFLLRFGVPSPSTLEPHPRPLLQRELMVPGTRHSAVLRDLRSGTLYSLTLYGLRGPHKADSIQGTARTLSPVLESPRDLQFSEIRETSAKVNWMPPPSRADSFKVSYQLADGGEPQSVQVDGQARTQKLQGLIPGARYEVTVVSVRGFEESEPLTGFLTTVPDGPTQLRALNLTEGFAVLHWKPPQNPVDTYDVQVTAPGAPPLQAETPGSAVDYPLHDLVLHTNYTATVRGLRGPNLTSPASITFTTGLEAPRDLEAKEVTPRTALLTWTEPPVRPAGYLLSFHTPGGQNQEILLPGGITSHQLLGLFPSTSYNARLQAMWGQSLLPPVSTSFTTGGLRIPFPRDCGEEMQNGAGASRTSTIFLNGNRERPLNVFCDMETDGGGWLVFQRRMDGQTDFWRDWEDYAHGFGNISGEFWLGNEALHSLTQAGDYSMRVDLRAGDEAVFAQYDSFHVDSAAEYYRLHLEGYHGTAGDSMSYHSGSVFSARDRDPNSLLISCAVSYRGAWWYRNCHYANLNGLYGSTVDHQGVSWYHWKGFEFSVPFTEMKLRPRNFRSPAGGG

SEQ ID NO: 20 - protein, 673 aa, Homo sapiens
MRLSWSVAQGPFDSFVVQYEDTNGQPQALLVDGDQSKILISGLEPSTPYRFLLYGLHEGKRLGPLSAEGTTGLAPAGQTSEESRPRLSQLSVTDVTTSSLRLNWEAPPGAFDSFLLRFGVPSPSTLEPHPRPLLQRELMVPGTRHSAVLRDLRSGTLYSLTLYGLRGPHKADSIQGTARTLSPVLESPRDLQFSEIRETSAKVNWMPPPSRADSFKVSYQLADGGEPQSVQVDGQARTQKLQGLIPGARYEVTVVSVRGFEESEPLTGFLTTVPDGPTQLRALNLTEGFAVLHWKPPQNPVDTYDVQVTAPGAPPLQAETPGSAVDYPLHDLVLHTNYTATVRGLRGPNLTSPASITFTTGLEAPRDLEAKEVTPRTALLTWTEPPVRPAGYLLSFHTPGGQNQEILLPGGITSHQLLGLFPSTSYNARLQAMWGQSLLPPVSTSFTTGGLRIPFPRDCGEEMQNGAGASRTSTIFLNGNRERPLNVFCDMETDGGGWLVFQRRMDGQTDFWRDWEDYAHGFGNISGEFWLGNEALHSLTQAGDYSMRVDLRAGDEAVFAQYDSFHVDSAAEYYRLHLEGYHGTAGDSMSYHSGSVFSARDRDPNSLLISCAVSYRGAWWYRNCHYANLNGLYGSTVDHQGVSWYHWKGFEFSVPFTEMKLRPRNFRSPAGGG

SEQ ID NO: 21 - protein, 4244 aa, Homo sapiens
MMPAQYALTSSLVLLVLLSTARAGPFSSRSNVTLPAPRPPPQPGGHTVGAGVGSPSSQLYEHTVEGGEKQVVFTHRINLPPSTGCGCPPGTEPPVLASEVQALRVRLEILEELVKGLKEQCTGGCCPASAQAGTGQTDVRTLCSLHGVFDLSRCTCSCEPGWGGPTCSDPTDAEIPPSSPPSASGSCPDDCNDQGRCVRGRCVCFPGYTGPSCGWPSCPGDCQGRGRCVQGVCVCRAGFSGPDCSQRSCPRGCSQRGRCEGGRCVCDPGYTGDDCGMRSCPRGCSQRGRCENGRCVCNPGYTGEDCGVRSCPRGCSQRGRCKDGRCVCDPGYTGEDCGTRSCPWDCGEGGRCVDGRCVCWPGYTGEDCSTRTCPRDCRGRGRCEDGECICDTGYSGDDCGVRSCPGDCNQRGRCEDGRCVCWPGYTGTDCGSRACPRDCRGRGRCENGVCVCNAGYSGEDCGVRSCPGDCRGRGRCESGRCMCWPGYTGRDCGTRACPGDCRGRGRCVDGRCVCNPGFTGEDCGSRRCPGDCRGHGLCEDGVCVCDAGYSGEDCSTRSCPGGCRGRGQCLDGRCVCEDGYSGEDCGVRQCPNDCSQHGVCQDGVCICWEGYVSEDCSIRTCPSNCHGRGRCEEGRCLCDPGYTGPTCATRMCPADCRGRGRCVQGVCLCHVGYGGEDCGQEEPPASACPGGCGPRELCRAGQCVCVEGFRGPDCAIQTCPGDCRGRGECHDGSCVCKDGYAGEDCGEEVPTIEGMRMHLLEETTVRTEWTPAPGPVDAYEIQFIPTTEGASPPFTARVPSSASAYDQRGLAPGQEYQVTVRALRGTSWGLPASKTITTMIDGPQDLRVVAVTPTTLELGWLRPQAEVDRFVVSYVSAGNQRVRLEVPPEADGTLLTDLMPGVEYVVTVTAERGRAVSYPASVRANTGSSPLGLLGTTDEPPPSGPSTTQGAQAPLLQQRPQELGELRVLGRDETGRLRVVWTAQPDTFAYFQLRMRVPEGPGAHEEVLPGDVRQALVPPPPPGTPYELSLHGVPPGGKPSDPIIYQGIMDKDEEKPGKSSGPPRLGELTVTDRTSDSLLLRWTVPEGEFDSFVIQYKDRDGQPQVVPVEGPQRSAVITSLDPGRKYKFVLYGFVGKKRHGPLVAEAKILPQSDPSPGTPPHLGNLWVTDPTPDSLHLSWTVPEGQFDTFMVQYRDRDGRPQVVPVEGPERSFVVSSLDPDHKYRFTLFGIANKKRYGPLTADGTTAPERKEEPPRPEFLEQPLLGELTVTGVTPDSLRLSWTVAQGPFDSFMVQYKDAQGQPQAVPVAGDENEVTVPGLDPDRKYKMNLYGLRGRQRVGPESVVAKTAPQEDVDETPSPTELGTEAPESPEEPLLGELTVTGSSPDSLSLFWTVPQGSFDSFTVQYKDRDGRPRAVRVGGKESEVTVGGLEPGHKYKMHLYGLHEGQRVGPVSAVGVTAPQQEETPPATESPLEPRLGELTVTDVTPNSVGLSWTVPEGQFDSFIVQYKDKDGQPQVVPVAADQREVTVYNLEPERKYKMNMYGLHDGQRMGPLSVVIVTAPLPPAPATEASKPPLEPRLGELTVTDITPDSVGLSWTVPEGEFDSFVVQYKDRDGQPQVVPVAADQREVTIPDLEPSRKYKFLLFGIQDGKRRSPVSVEAKTVARGDASPGAPPRLGELWVTDPTPDSLRLSWTVPEGQFDSFVVQFKDKDGPQVVPVEGHERSVTVTPLDAGRKYRFLLYGLLGKKRHGPLTADGTTEARSAMDDTGTKRPPKPRLGEELQVTTVTQNSVGLSWTVPEGQFDSFVVQYKDRDGQPQVVPVEGSLREVSVPGLDPAHRYKLLLYGLHHGKRVGPISAVAITAGREETETETTAPTPPAPEPHLGELTVEEATSHTLHLSWMVTEGEFDSFEIQYTDRDGQLQMVRIGGDRNDITLSGLESDHRYLVTLYGFSDGKHVGPVHVEALTVPEEEKPSEPPTATPEPPIKPRLGELTVTDATPDSLSLSWTVPEGQFDHFLVQYRNGDGQPKAVRVPGHEEGVTISGLEPDHKYKMNLYGFHGGQRMGPVSVVGVTAAEEETPSPTEPSMEAPEPAEEPLLGELTVTGSSPDSLSLSWTVPQGRFDSFTVQYKDRDGRPQVVRVGGEESEVTVGGLEPGRKYKMHLYGLHEGRRVGPVSAVGVTAPEEESPDAPLAKLRLGQMTVRDITSDSLSLSWTVPEGQFDHFLVQFKNGDGQPKAVRVPGHEDGVTISGLEPDHKYKMNLYGFHGGQRVGPVSAVGLTAPGKDEEMAPASTEPPTPEPPIKPRLEELTVTDATPDSLSLSWTVPEGQFDHFLVQYKNGDGQPKATRVPGHEDRVTISGLEPDNKYKMNLYGFHGGQRVGPVSAIGVTAAEEETPSPTEPSMEAPEPPEEPLLGELTVTGSSPDSLSLSWTVPQGRFDSFTVQYKDRDGRPQVVRVGGEESEVTVGGLEPGRKYKMHLYGLHEGRRVGPVSTVGVTAPQEDVDETPSPTEPGTEAPGPPEEPLLGELTVTGSSPDSLSLSWTVPQGRFDSFTVQYKDRDGRPQAVRVGGQESKVTVRGLEPGRKYKMHLYGLHEGRRLGPVSAVGVTEDEAETTQAVPTMTPEPPIKPRLGELTMTDATPDSLSLSWTVPEGQFDHFLVQYRNGDGQPKAVRVPGHEDGVTISGLEPDHKYKMNLYGFHGGQRVGPISVIGVTAAEEETPSPTELSTEAPEPPEEPLLGELTVTGSSPDSLSLSWTIPQGHFDSFTVQYKDRDGRPQVMRVRGEESEVTVGGLEPGRKYKMHLYGLHEGRRVGPVSTVGVTAPEDEAETTQAVPTTTPEPPNKPRLGELTVTDATPDSLSLSWMVPEGQFDHFLVQYRNGDGQPKVVRVPGHEDGVTISGLEPDHKYKMNLYGFHGGQRVGPISVIGVTAAEEETPAPTEPSTEAPEPPEEPLLGELTVTGSSPDSLSLSWTIPQGRFDSFTVQYKDRDGRPQVVRVRGEESEVTVGGLEPGCKYKMHLYGLHEGQRVGPVSAVGVTAPKDEAETTQAVPTMTPEPPIKPRLGELTVTDATPDSLSLSWMVPEGQFDHFLVQYRNGDGQPKAVRVPGHEDGVTISGLEPDHKYKMNLYGFHGGQRVGPVSAIGVTEEETPSPTEPSTEAPEAPEEPLLGELTVTGSSPDSLSLSWTVPQGRFDSFTVQYKDRDGQPQVVRVRGEESEVTVGGLEPGRKYKMHLYGLHEGQRVGPVSTVGITAPLPTPLPVEPRLGELAVAAVTSDSVGLSWTVAQGPFDSFLVQYRDAQGQPQAVPVSGDLRAVAVSGLDPARKYKFLLFGLQNGKRHGPVPVEARTAPDTKPSPRLGELTVTDATPDSVGLSWTVPEGEFDSFVVQYKDKDGRLQVVPVAANQREVTVQGLEPSRKYRFLLYGLSGRKRLGPISADSTTAPLEKELPPHLGELTVAEETSSSLRLSWTVAQGPFDSFVVQYRDTDGQPRAVPVAADQRTVTVEDLEPGKKYKFLLYGLLGGKRLGPVSALGMTAPEEDTPAPELAPEAPEPPEEPRLGVLTVTDTTPDSMRLSWSVAQGPFDSFVVQYEDTNGQPQALLVDGDQSKILISGLEPSTPYRFLLYGLHEGKRLGPLSAEGTTGLAPAGQTSEESRPRLSQLSVTDVTTSSLRLNWEAPPGAFDSFLLRFGVPSPSTLEPHPRPLLQRELMVPGTRHSAVLRDLRSGTLYSLTLYGLRGPHKADSIQGTARTLSPVLESPRDLQFSEIRETSAKVNWMPPPSRADSFKVSYQLADGGEPQSVQVDGQARTQKLQGLIPGARYEVTVVSVRGFEESEPLTGFLTTVPDGPTQLRALNLTEGFAVLHWKPPQNPVDTYDVQVTAPGAPPLQAETPGSAVDYPLHDLVLHTNYTATVRGLRGPNLTSPASITFTTGLEAPRDLEAKEVTPRTALLTWTEPPVRPAGYLLSFHTPGGQNQEILLPGGITSHQLLGLFPSTSYNARLQAMWGQSLLPPVSTSFTTGGLRIPFPRDCGEEMQNGAGASRTSTIFLNGNRERPLNVFCDMETDGGGWLVFQRRMDGQTDFWRDWEDYAHGFGNISGEFWLGNEALHSLTQAGDYSMRVDLRAGDEAVFAQYDSFHVDSAAEYYRLHLEGYHGTAGDSMSYHSGSVFSARDRDPNSLLISCAVSYRGAWWYRNCHYANLNGLYGSTVDHQGVSWYHWKGFEFSVPFTEMKLRPRNFRSPAGGG

SEQ ID NO: 22 - protein, 4245 aa, Homo sapiens
MMPAQYALTSSLVLLVLLSTARAGPFSSRSNVTLPAPRPPPQPGGHTVGAGVGSPSSQLYEHTVEGGEKQVVFTHRINLPPSTGCGCPPGTEPPVLASEVQALRVRLEILEELVKGLKEQCTGGCCPASAQAGTGEQGQTDVRTLCSLHGVFDLSRCTCSCEPGWGGPTCSDPTDAEIPPSSPPSASGSCPDDCNDQGRCVRGRCVCFPGYTGPSCGWPSCPGDCQGRGRCVQGVCVCRAGFSGPDCSQRSCPRGCSQRGRCEGGRCVCDPGYTGDDCGMRSCPRGCSQRGRCENGRCVCNPGYTGEDCGVRSCPRGCSQRGRCKDGRCVCDPGYTGEDCGTRSCPWDCGEGGRCVDGRCVCWPGYTGEDCSTRTCPRDCRGRGRCEDGECICDTGYSGDDCGVRSCPGDCNQRGRCEDGRCVCWPGYTGTDCGSRACPRDCRGRGRCENGVCVCNAGYSGEDCGVRSCPGDCRGRGRCESGRCMCWPGYTGRDCGTRACPGDCRGRGRCVDGRCVCNPGFTGEDCGSRRCPGDCRGHGLCEDGVCVCDAGYSGEDCSTRSCPGGCRGRGQCLDGRCVCEDGYSGEDCGVRQCPNDCSQHGVCQDGVCICWEGYVSEDCSIRTCPSNCHGRGRCEEGRCLCDPGYTGPTCATRMCPADCRGRGRCVQGVCLCHVGYGGEDCGQEEPPASACPGGCGPRELCRAGQCVCVEGFRGPDCAIQTCPGDCRGRGECHDGSCVCKDGYAGEDCGEEVPTIEGMRMHLLEETTVRTEWTPAPGPVDAYEIQFIPTTEGASPPFTARVPSSASAYDQRGLAPGQEYQVTVRALRGTSWGLPASKTITTMIDGPQDLRVVAVTPTTLELGWLRPQAEVDRFVVSYVSAGNQRVRLEVPPEADGTLLTDLMPGVEYVVTVTAERGRAVSYPASVRANTGSSPLGLLGTTDEPPPSGPSTTQGAQAPLLQQRPQELGELRVLGRDETGRLRVVWTAQPDTFAYFQLRMRVPEGPGAHEEVLPGDVRQALVPPPPPGTPYELSLHGVPPGGKPSDPIIYQGIMDKDEEKPGKSSGPPRLGELTVTDRTSDSLLLRWTVPEGEFDSFVIQYKDRDGQPQVVPVEGPQRSAVITSLDPGRKYKFVLYGFVGKKRHGPLVAEAKILPQSDPSPGTPPHLGNLWVTDPTPDSLHLSWTVPEGQFDTFMVQYRDRDGRPQVVPVEGPERSFVVSSLDPDHKYRFTLFGIANKKRYGPLTADGTTAPERKEEPPRPEFLEQPLLGELTVTGVTPDSLRLSWTVAQGPFDSFMVQYKDAQGQPQAVPVAGDENEVTVPGLDPDRKYKMNLYGLRGRQRVGPESVVAKTAPQEDVDETPSPTELGTEAPESPEEPLLGELTVTGSSPDSLSLFWTVPQGSFDSFTVQYKDRDGRPRAVRVGGKESEVTVGGLEPGHKYKMHLYGLHEGQRVGPVSAVGVTAPQQEETPPATESPLEPRLGELTVTDVTPNSVGLSWTVPEGQFDSFIVQYKDKDGQPQVVPVAADQREVTVYNLEPERKYKMNMYGLHDGQRMGPLSVVIVTAPLPPAPATEASKPPLEPRLGELTVTDITPDSVGLSWTVPEGEFDSFVVQYKDRDGQPQVVPVAADQREVTIPDLEPSRKYKFLLFGIQDGKRRSPVSVEAKTVARGDASPGAPPRLGELWVTDPTPDSLRLSWTVPEGQFDSFVVQFKDKDGPQVVPVEGHERSVTVTPLDAGRKYRFLLYGLLGKKRHGPLTADGTTEARSAMDDTGTKRPPKPRLGEELQVTTVTQNSVGLSWTVPEGQFDSFVVQYKDRDGQPQVVPVEGSLREVSVPGLDPAHRYKLLLYGLHHGKRVGPISAVAITAGREETETETTAPTPPAPEPHLGELTVEEATSHTLHLSWMVTEGEFDSFEIQYTDRDGQLQMVRIGGDRNDITLSGLESDHRYLVTLYGFSDGKHVGPVHVEALTVPEEEKPSEPPTATPEPPIKPRLGELTVTDATPDSLSLSWTVPEGQFDHFLVQYRNGDGQPKAVRVPGHEEGVTISGLEPDHKYKMNLYGFHGGQRMGPVSVVGVTAAEEETPSPTEPSMEAPEPAEEPLLGELTVTGSSPDSLSLSWTVPQGRFDSFTVQYKDRDGRPQVVRVGGEESEVTVGGLEPGRKYKMHLYGLHEGRRVGPVSAVGVTAPEEESPDAPLAKLRLGQMTVRDITSDSLSLSWTVPEGQFDHFLVQFKNGDGQPKAVRVPGHEDGVTISGLEPDHKYKMNLYGFHGGQRVGPVSAVGLTAPGKDEEMAPASTEPPTPEPPIKPRLEELTVTDATPDSLSLSWTVPEGQFDHFLVQYKNGDGQPKATRVPGHEDRVTISGLEPDNKYKMNLYGFHGGQRVGPVSAIGVTAAEEETPSPTEPSMEAPEPPEEPLLGELTVTGSSPDSLSLSWTVPQGRFDSFTVQYKDRDGRPQVVRVGGEESEVTVGGLEPGRKYKMHLYGLHEGRRVGPVSTVGVTAPQEDVDETPSPTEPGTEAPGPPEEPLLGELTVTGSSPDSLSLSWTVPQGRFDSFTVQYKDRDGRPQAVRVGGQESKVTVRGLEPGRKYKMHLYGLHEGRRLGPVSAVGVTEDEAETTQAVPTMTPEPPIKPRLGELTMTDATPDSLSLSWTVPEGQFDHFLVQYRNGDGQPKAVRVPGHEDGVTISGLEPDHKYKMNLYGFHGGQRVGPISVIGVTAAEEETPSPTELSTEAPEPPEEPLLGELTVTGSSPDSLSLSWTIPQGHFDSFTVQYKDRDGRPQVMRVRGEESEVTVGGLEPGRKYKMHLYGLHEGRRVGPVSTVGVTEDEAETTQAVPTTTPEPPNKPRLGELTVTDATPDSLSLSWMVPEGQFDHFLVQYRNGDGQPKVVRVPGHEDGVTISGLEPDHKYKMNLYGFHGGQRVGPISVIGVTAAEEETPAPTEPSTEAPEPPEEPLLGELTVTGSSPDSLSLSWTIPQGRFDSFTVQYKDRDGRPQVVRVRGEESEVTVGGLEPGCKYKMHLYGLHEGQRVGPVSAVGVTAPKDEAETTQAVPTMTPEPPIKPRLGELTVTDATPDSLSLSWMVPEGQFDHFLVQYRNGDGQPKAVRVPGHEDGVTISGLEPDHKYKMNLYGFHGGQRVGPVSAIGVTEEETPSPTEPSTEAPEAPEEPLLGELTVTGSSPDSLSLSWTVPQGRFDSFTVQYKDRDGQPQVVRVRGEESEVTVGGLEPGRKYKMHLYGLHEGQRVGPVSTVGITAPLPTPLPVEPRLGELAVAAVTSDSVGLSWTVAQGPFDSFLVQYRDAQGQPQAVPVSGDLRAVAVSGLDPARKYKFLLFGLQNGKRHGPVPVEARTAPDTKPSPRLGELTVTDATPDSVGLSWTVPEGEFDSFVVQYKDKDGRLQVVPVAANQREVTVQGLEPSRKYRFLLYGLSGRKRLGPISADSTTAPLEKELPPHLGELTVAEETSSSLRLSWTVAQGPFDSFVVQYRDTDGQPRAVPVAADQRTVTVEDLEPGKKYKFLLYGLLGGKRLGPVSALGMTAPEEDTPAPELAPEAPEPPEEPRLGVLTVTDTTPDSMRLSWSVAQGPFDSFVVQYEDTNGQPQALLVDGDQSKILISGLEPSTPYRFLLYGLHEGKRLGPLSAEGTTGLAPAGQTSEESRPRLSQLSVTDVTTSSLRLNWEAPPGAFDSFLLRFGVPSPSTLEPHPRPLLQRELMVPGTRHSAVLRDLRSGTLYSLTLYGLRGPHKADSIQGTARTLSPVLESPRDLQFSEIRETSAKVNWMPPPSRADSFKVSYQLADGGEPQSVQVDGQARTQKLQGLIPGARYEVTVVSVRGFEESEPLTGFLTTVPDGPTQLRALNLTEGFAVLHWKPPQNPVDTYDVQVTAPGAPPLQAETPGSAVDYPLHDLVLHTNYTATVRGLRGPNLTSPASITFTTGLEAPRDLEAKEVTPRTALLTWTEPPVRPAGYLLSFHTPGGQNQEILLPGGITSHQLLGLFPSTSYNARLQAMWGQSLLPPVSTSFTTGGLRIPFPRDCGEEMQNGAGASRTSTIFLNGNRERPLNVFCDMETDGGGWLVFQRRMDGQTDFWRDWEDYAHGFGNISGEFWLGNEALHSLTQAGDYSMRVDLRAGDEAVFAQYDSFHVDSAAEYYRLHLEGYHGTAGDSMSYHSGSVFSARDRDPNSLLISCAVSYRGAWWYRNCHYANLNGLYGSTVDHQGVSWYHWKGFEFSVPFTEMKLRPRNFRSPAGGG

SEQ ID NO: 23 - protein, 976 aa, Homo sapiens [sequence omitted]

SEQ ID NO: 24 - protein, 972 aa, Homo sapiens
MRGARGAWDFLCVLLLLLRVQTGSSQPSVSPGEPSPPSIHPGKSDLIVRVGDEIRLLCTDPGFVKWTFEILDETNENKQNEWITEKAEATNTGKYTCTNKHGLSNSIYVFVRDPAKLFLVDRSLYGKEDNDTLVRCPLTDPEVTNYSLKGCQGKPLPKDLRFIPDPKAGIMIKSVKRAYHRLCLHCSVDQEGKSVLSEKFILKVRPAFKAVPVVSVSKASYLLREGEEFTVTCTIKDVSSSVYSTWKRENSQTKLQEKYNSWHHGDFNYERQATLTISSARVNDSGVFMCYANNTFGSANVTTTLEVVDKGFINIFPMINTTVFVNDGENVDLIVEYEAFPKPEHQQWIYMNRTFTDKWEDYPKSENESNIRYVSELHLTRLKGTEGGTYTFLVSNSDVNAAIAFNVYVNTKPEILTYDRLVNGMLQCVAAGFPEPTIDWYFCPGTEQRCSASVLPVDVQTLNSSGPPFGKLVVQSSIDSSAFKHNGTVECKAYNDVGKTSAYFNFAFKEQIHPHTLFTPLLIGFVIVAGMMCIIVMILTYKYLQKPMYEVQWKVVEEINGNNYVYIDPTQLPYDHKWEFPRNRLSFGKTLGAGAFGKVVEATAYGLIKSDAAMTVAVKMLKPSAHLTEREALMSELKVLSYLGNHMNIVNLLGACTIGGPTLVITEYCCYGDLLNFLRRKRDSFICSKQEDHAEAALYKNLLHSKESSCSDSTNEYMDMKPGVSYVVPTKADKRRSVRIGSYIERDVTPAIMEDDELALDLEDLLSFSYQVAKGMAFLASKNCIHRDLAARNILLTHGRITKICDFGLARDIKNDSNYVVKGNARLPVKWMAPESIFNCVYTFESDVWSYGIFLWELFSLGSSPYPGMPVDSKFYKMIKEGFRMLSPEHAPAEMYDIMKTCWDADPLKRPTFKQIVQLIEKQISESTNHIYSNLANCSPNRQKPVVDHSVRINSVGSTASSSQPLLVHDDV

SEQ ID NO: 25 - protein, 413 aa, Homo sapiens
MRGARGAWDFLCVLLLLLRVQTGSSQPSVSPGEPSPPSIHPGKSDLIVRVGDEIRLLCTDPGFVKWTFEILDETNENKQNEWITEKAEATNTGKYTCTNKHGLSNSIYVFVRDPAKLFLVDRSLYGKEDNDTLVRCPLTDPEVTNYSLKGCQGKPLPKDLRFIPDPKAGIMIKSVKRAYHRLCLHCSVDQEGKSVLSEKFILKVRPAFKAVPVVSVSKASYLLREGEEFTVTCTIKDVSSSVYSTWKRENSQTKLQEKYNSWHHGDFNYERQATLTISSARVNDSGVFMCYANNTFGSANVTTTLEVVDKGFINIFPMINTTVFVNDGENVDLIVEYEAFPKPEHQQWIYMNRTFTDKWEDYPKSENESNIRYVSELHLTRLKGTEGGTYTFLVSNSDVNAAIAFNVYVNTSL

SEQ ID NO: 26 - protein, 318 aa, Homo sapiens
MASPGCLLCVLGLLLCGAASLELSRPHGDTAKKPIIGILMQKCRNKVMKNYGRYYIAASYVKYLESAGARVVPVRLDLTEKDYEILFKSINGILFPGGSVDLRRSDYAKVAKIFYNLSIQSFDDGDYFPVWGTCLGFEELSLLISGECLLTATDTVDVAMPLNFTGGQLHSRMFQNFPTELLLSLAVEPLTANFHKWSLSVKNFTMNEKLKKFFNVLTTNTDGKIEFISTMEGYKYPVYGVQWHPEKAPYEWKNLDGISHAPNAVKTAFYLAEFFVNEARKNNHHFKSESEEEKALIYQFSPIYTGNISSFQQCYIFD

SEQ ID NO: 27 - protein, 90 aa, Homo sapiens
MACPLDQAIGLLVAIFHKYSGREGDKHTLSKKELKELIQKELTIGSKLQDAEIARLMEDLDRNKDQEVNFQEYVTFLGALALIYNEALKG

SEQ ID NO: 28 - protein, 375 aa, Homo sapiens; identical to SEQ ID NO: 4

SEQ ID NO: 29 - protein, 418 aa, Homo sapiens
MQALVLLLCIGALLGHSSCQNPASPPEEGSPDPDSTGALVEEEDPFFKVPVNKLAAAVSNFGYDLYRVRSSTSPTTNVLLSPLSVATALSALSLGAEQRTESIIHRALYYDLISSPDIHGTYKELLDTVTAPQKNLKSASRIVFEKKLRIKSSFVAPLEKSYGTRPRVLTGNPRLDLQEINNWVQAQMKGKLARSTKEIPDEISILLLGVAHFKGQWVTKFDSRKTSLEDFYLDEERTVRVPMMSDPKAVLRYGLDSDLSCKIAQLPLTGSMSIIFFLPLKVTQNLTLIEESLTSEFIHDIDRELKTVQAVLTVPKLKLSYEGEVTKSLQEMKLQSLFDSPDFSKITGKPIKLTQVEHRAGFEWNEDGAGTTPSPGLQPAHLTFPLDYHLNQPFIFVLRDTDTGALLFIGKILDPRGP

SEQ ID NO: 30 - protein, 375 aa, Homo sapiens
MDALQLANSAFAVDLFKQLCEKEPLGNVLFSPICLSTSLSLAQVGAKGDTANEIGQVLHFENVKDVPFGFQTVTSDVNKLSSFYSLKLIKRLYVDKSLNLSTEFISSTKRPYAKELETVDFKDKLEETKGQINNSIKDLTDGHFENILADNSVNDQTKILVVNAAYFVGKWMKKFSESETKECPFRVNKTDTKPVQMMNMEATFCMGNIDSINCKIIELPFQNKHLSMFILLPKDVEDESTGLEKIEKQLNSESLSQWTNPSTMANAKVKLSIPKFKVEKMIDPKACLENLGLKHIFSEDTSDFSGMSETKGVALSNVIHKVCLEITEDGGDSIEVPGARILQHKDELNADHPFIYIIRHNKTRNIIFFGKFCSP

SEQ ID NO: 31 - protein, 231 aa, Homo sapiens
MDALQLANSAFAVDLFKQLCEKEPLGNVLFSPICLSTSLSLAQVGAKGDTANEIGQVLHFENVKDVPFGFQTVTSDVNKLSSFYSLKLIKRLYVDKSLNLSTEFISSTKRPYAKELETVDFKDKLEETKGQINNSIKDLTDGHFENILADNSVNDQTKILVVNAAYFVGKWMKKFSESETKECPFRVNKVCGAACSSKRSPIIDVKNDRDRVGHKSIPMRNLRARPAKCLS

SEQ ID NO: 32 - protein, 782 aa, Homo sapiens
MAPHRPAPALLCALSLALCALSLPVRAATASRGASQAGAPQGRVPEARPNSMVVEHPEFLKAGKEPGLQIWRVEKFDLVPVPTNLYGDFFTGDAYVILKTVQLRNGNLQYDLHYWLGNECSQDESGAAAIFTVQLDDYLNGRAVQHREVQGFESATFLGYFKSGLKYKKGGVASGFKHVVPNEVVVQRLFQVKGRRVVRATEVPVSWESFNNGDCFILDLGNNIHQWCGSNSNRYERLKATQVSKGIRDNERSGRARVHVSEEGTEPEAMLQVLGPKPALPAGTEDTAKEDAANRKLAKLYKVSNGAGTMSVSLVADENPFAQGALKSEDCFILDHGKDGKIFVWKGKQANTEERKAALKTASDFITKMDYPKQTQVSVLPEGGETPLFKQFFKNWRDPDQTDGLGLSYLSSHIANVERVPFDAATLHTSTAMAAQHGMDDDGTGQKQIWRIEGSNKVPVDPATYGQFYGGDSYIILYNYRHGGRQGQIIYNWQGAQSTQDEVAASAILTAQLDEELGGTPVQSRVVQGKEPAHLMSLFGGKPMIIYKGGTSREGGQTAPASTRLFQVRANSAGATRAVEVLPKAGALNSNDAFVLKTPSAAYLWVGTGASEAEKTGAQELLRVLRAQPVQVAEGSEPDGFWEALGGKAAYRTSPRLKDKKMDAHPPRLFACSNKIGRFVIEEVPGELMQEDLATDDVMLLDTWDQVFVWVGKDSQEEEKTEALTSAKRYIETDPANRDRRTPITVVKQGFEPPSFVGWFLGWDDDYWSVDPLDRAMAELAA

SEQ ID NO: 33 - protein, 731 aa, Homo sapiens
MVVEHPEFLKAGKEPGLQIWRVEKFDLVPVPTNLYGDFFTGDAYVILKTVQLRNGNLQYDLHYWLGNECSQDESGAAAIFTVQLDDYLNGRAVQHREVQGFESATFLGYFKSGLKYKKGGVASGFKHVVPNEVVVQRLFQVKGRRVVRATEVPVSWESFNNGDCFILDLGNNIHQWCGSNSNRYERLKATQVSKGIRDNERSGRARVHVSEEGTEPEAMLQVLGPKPALPAGTEDTAKEDAANRKLAKLYKVSNGAGTMSVSLVADENPFAQGALKSEDCFILDHGKDGKIFVWKGKQANTEERKAALKTASDFITKMDYPKQTQVSVLPEGGETPLFKQFFKNWRDPDQTDGLGLSYLSSHIANVERVPFDAATLHTSTAMAAQHGMDDDGTGQKQIWRIEGSNKVPVDPATYGQFYGGDSYIILYNYRHGGRQGQIIYNWQGAQSTQDEVAASAILTAQLDEELGGTPVQSRVVQGKEPAHLMSLFGGKPMIIYKGGTSREGGQTAPASTRLFQVRANSAGATRAVEVLPKAGALNSNDAFVLKTPSAAYLWVGTGASEAEKTGAQELLRVLRAQPVQVAEGSEPDGFWEALGGKAAYRTSPRLKDKKMDAHPPRLFACSNKIGRFVIEEVPGELMQEDLATDDVMLLDTWDQVFVWVGKDSQEEEKTEALTSAKRYIETDPANRDRRTPITVVKQGFEPPSFVGWFLGWDDDYWSVDPLDRAMAELAA

SEQ ID NO: 34 - protein, 742 aa, Homo sapiens
MEKLFCCFPNSMVVEHPEFLKAGKEPGLQIWRVEKFDLVPVPTNLYGDFFTGDAYVILKTVQLRNGNLQYDLHYWLGNECSQDESGAAAIFTVQLDDYLNGRAVQHREVQGFESATFLGYFKSGLKYKKGGVASGFKHVVPNEVVVQRLFQVKGRRVVRATEVPVSWESFNNGDCFILDLGNNIHQWCGSNSNRYERLKATQVSKGIRDNERSGRARVHVSEEGTEPEAMLQVLGPKPALPAGTEDTAKEDAANRKLAKLYKVSNGAGTMSVSLVADENPFAQGALKSEDCFILDHGKDGKIFVWKGKQANTEERKAALKTASDFITKMDYPKQTQVSVLPEGGETPLFKQFFKNWRDPDQTDGLGLSYLSSHIANVERVPFDAATLHTSTAMAAQHGMDDDGTGQKQIWRIEGSNKVPVDPATYGQFYGGDSYIILYNYRHGGRQGQIIYNWQGAQSTQDEVAASAILTAQLDEELGGTPVQSRVVQGKEPAHLMSLFGGKPMIIYKGGTSREGGQTAPASTRLFQVRANSAGATRAVEVLPKAGALNSNDAFVLKTPSAAYLWVGTGASEAEKTGAQELLRVLRAQPVQVAEGSEPDGFWEALGGKAAYRTSPRLKDKKMDAHPPRLFACSNKIGRFVIEEVPGELMQEDLATDDVMLLDTWDQVFVWVGKDSQEEEKTEALTSAKRYIETDPANRDRRTPITVVKQGFEPPSFVGWFLGWDDDYWSVDPLDRAMAELAA

SEQ ID NO: 35 - protein, 739 aa, Homo sapiens
MPLCTPNSMVVEHPEFLKAGKEPGLQIWRVEKFDLVPVPTNLYGDFFTGDAYVILKTVQLRNGNLQYDLHYWLGNECSQDESGAAAIFTVQLDDYLNGRAVQHREVQGFESATFLGYFKSGLKYKKGGVASGFKHVVPNEVVVQRLFQVKGRRVVRATEVPVSWESFNNGDCFILDLGNNIHQWCGSNSNRYERLKATQVSKGIRDNERSGRARVHVSEEGTEPEAMLQVLGPKPALPAGTEDTAKEDAANRKLAKLYKVSNGAGTMSVSLVADENPFAQGALKSEDCFILDHGKDGKIFVWKGKQANTEERKAALKTASDFITKMDYPKQTQVSVLPEGGETPLFKQFFKNWRDPDQTDGLGLSYLSSHIANVERVPFDAATLHTSTAMAAQHGMDDDGTGQKQIWRIEGSNKVPVDPATYGQFYGGDSYIILYNYRHGGRQGQIIYNWQGAQSTQDEVAASAILTAQLDEELGGTPVQSRVVQGKEPAHLMSLFGGKPMIIYKGGTSREGGQTAPASTRLFQVRANSAGATRAVEVLPKAGALNSNDAFVLKTPSAAYLWVGTGASEAEKTGAQELLRVLRAQPVQVAEGSEPDGFWEALGGKAAYRTSPRLKDKKMDAHPPRLFACSNKIGRFVIEEVPGELMQEDLATDDVMLLDTWDQVFVWVGKDSQEEEKTEALTSAKRYIETDPANRDRRTPITVVKQGFEPPSFVGWFLGWDDDYWSVDPLDRAMAELAA

SEQ ID NO: 36 - protein, 338 aa, Homo sapiens
MSLSAFTLFLALIGGTSGQYYDYDFPLSIYGQSSPNCAPECNCPESYPSAMYCDELKLKSVPMVPPGIKYLYLRNNQIDHIDEKAFENVTDLQWLILDHNLLENSKIKGRVFSKLKQLKKLHINHNNLTESVGPLPKSLEDLQLTHNKITKLGSFEGLVNLTFIHLQHNRLKEDAVSAAFKGLKSLEYLDLSFNQIARLPSGLPVSLLTLYLDNNKISNIPDEYFKRFNALQYLRLSHNELADSGIPGNSFNVSSLVELDLSYNKLKNIPTVNENLENYYLEVNQLEKFDIKSFCKILGPLSYSKIKHLRLDGNRISETSLPPDMYECLRVANEVTLN

SEQ ID NO: 37 - protein, 1156 aa, Homo sapiens
MSKLRMVLLEDSGSADFRRHFVNLSPFTITVVLLLSACFVTSSLGGTDKELRLVDGENKCSGRVEVKVQEEWGTVCNNGWSMEAVSVICNQLGCPTAIKAPGWANSSAGSGRIWMDHVSCRGNESALWDCKHDGWGKHSNCTHQQDAGVTCSDGSNLEMRLTRGGNMCSGRIEIKFQGRWGTVCDDNFNIDHASVICRQLECGSAVSFSGSSNFGEGSGPIWFDDLICNGNESALWNCKHQGWGKHNCDHAEDAGVICSKGADLSLRLVDGVTECSGRLEVRFQGEWGTICDDGWDSYDAAVACKQLGCPTAVTAIGRVNASKGFGHIWLDSVSCQGHEPAIWQCKHHEWGKHYCNHNEDAGVTCSDGSDLELRLRGGGSRCAGTVEVEIQRLLGKVCDRGWGLKEADVVCRQLGCGSALKTSYQVYSKIQATNTWLFLSSCNGNETSLWDCKNWQWGGLTCDHYEEAKITCSAHREPRLVGGDIPCSGRVEVKHGDTWGSICDSDFSLEAASVLCRELQCGTVVSILGGAHFGEGNGQIWAEEFQCEGHESHLSLCPVAPRPEGTCSHSRDVGVVCSRYTEIRLVNGKTPCEGRVELKTLGAWGSLCNSHWDIEDAHVLCQQLKCGVALSTPGGARFGKGNGQIWRHMFHCTGTEQHMGDCPVTALGASLCPSEQVASVICSGNQSQTLSSCNSSSLGPTRPTIPEESAVACIESGQLRLVNGGGRCAGRVEIYHEGSWGTICDDSWDLSDAHVVCRQLGCGEAINATGSAHFGEGTGPIWLDEMKCNGKESRIWQCHSHGWGQQNCRHKEDAGVICSEFMSLRLTSEASREACAGRLEVFYNGAWGTVGKSSMSETTVGVVCRQLGCADKGKINPASLDKAMSIPMWVDNVQCPKGPDTLWQCPSSPWEKRLASPSEETWITCDNKIRLQEGPTSCSGRVEIWHGGSWGTVCDDSWDLDDAQVVCQQLGCGPALKAFKEAEFGQGTGPIWLNEVKCKGNESSLWDCPARRWGHSECGHKEDAAVNCTDISVQKTPQKATTGRSSRQSSFIAVGILGVVLLAIFVALFFLTKKRRQRQRLAVSSRGENLVHQIQYREMNSCLNADDLDLMNSSENSHESADFSAAELISVSKFLPISGMEKEAILSHTEKENGNL

SEQ ID NO: 38 - protein, 1161 aa, Homo sapiens
MSKLRMVLLEDSGSADFRRHFVNLSPFTITVVLLLSACFVTSSLGGTDKELRLVDGENKCSGRVEVKVQEEWGTVCNNGWSMEAVSVICNQLGCPTAIKAPGWANSSAGSGRIWMDHVSCRGNESALWDCKHDGWGKHSNCTHQQDAGVTCSDGSNLEMRLTRGGNMCSGRIEIKFQGRWGTVCDDNFNIDHASVICRQLECGSAVSFSGSSNFGEGSGPIWFDDLICNGNESALWNCKHQGWGKHNCDHAEDAGVICSKGADLSLRLVDGVTECSGRLEVRFQGEWGTICDDGWDSYDAAVACKQLGCPTAVTAIGRVNASKGFGHIWLDSVSCQGHEPAIWQCKHHEWGKHYCNHNEDAGVTCSDGSDLELRLRGGGSRCAGTVEVEIQRLLGKVCDRGWGLKEADVVCRQLGCGSALKTSYQVYSKIQATNTWLFLSSCNGNETSLWDCKNWQWGGLTCDHYEEAKITCSAHREPRLVGGDIPCSGRVEVKHGDTWGSICDSDFSLEAASVLCRELQCGTVVSILGGAHFGEGNGQIWAEEFQCEGHESHLSLCPVAPRPEGTCSHSRDVGVVCSRYTEIRLVNGKTPCEGRVELKTLGAWGSLCNSHWDIEDAHVLCQQLKCGVALSTPGGARFGKGNGQIWRHMFHCTGTEQHMGDCPVTALGASLCPSEQVASVICSGNQSQTLSSCNSSSLGPTRPTIPEESAVACIESGQLRLVNGGGRCAGRVEIYHEGSWGTICDDSWDLSDAHVVCRQLGCGEAINATGSAHFGEGTGPIWLDEMKCNGKESRIWQCHSHGWGQQNCRHKEDAGVICSEFMSLRLTSEASREACAGRLEVFYNGAWGTVGKSSMSETTVGVVCRQLGCADKGKINPASLDKAMSIPMWVDNVQCPKGPDTLWQCPSSPWEKRLASPSEETWITCDNKIRLQEGPTSCSGRVEIWHGGSWGTVCDDSWDLDDAQVVCQQLGCGPALKAFKEAEFGQGTGPIWLNEVKCKGNESSLWDCPARRWGHSECGHKEDAAVNCTDISVQKTPQKATTGRSSRQSSFIAVGILGVVLLAIFVALFFLTKKRRQRQRLAVSSRGENLVHQIQYREMNSCLNADDLDLMNSSGLWVLGGSIAQGFRSVAAVEAQTFYFDKQLKKSKNVIGSLDAYNGQE

SEQ ID NO: 39 - protein, 1121 aa, Homo sapiens
MSKLRMVLLEDSGSADFRRHFVNLSPFTITVVLLLSACFVTSSLGGTDKELRLVDGENKCSGRVEVKVQEEWGTVCNNGWSMEAVSVICNQLGCPTAIKAPGWANSSAGSGRIWMDHVSCRGNESALWDCKHDGWGKHSNCTHQQDAGVTCSDGSNLEMRLTRGGNMCSGRIEIKFQGRWGTVCDDNFNIDHASVICRQLECGSAVSFSGSSNFGEGSGPIWFDDLICNGNESALWNCKHQGWGKHNCDHAEDAGVICSKGADLSLRLVDGVTECSGRLEVRFQGEWGTICDDGWDSYDAAVACKQLGCPTAVTAIGRVNASKGFGHIWLDSVSCQGHEPAIWQCKHHEWGKHYCNHNEDAGVTCSDGSDLELRLRGGGSRCAGTVEVEIQRLLGKVCDRGWGLKEADVVCRQLGCGSALKTSYQVYSKIQATNTWLFLSSCNGNETSLWDCKNWQWGGLTCDHYEEAKITCSAHREPRLVGGDIPCSGRVEVKHGDTWGSICDSDFSLEAASVLCRELQCGTVVSILGGAHFGEGNGQIWAEEFQCEGHESHLSLCPVAPRPEGTCSHSRDVGVVCSRYTEIRLVNGKTPCEGRVELKTLGAWGSLCNSHWDIEDAHVLCQQLKCGVALSTPGGARFGKGNGQIWRHMFHCTGTEQHMGDCPVTALGASLCPSEQVASVICSGNQSQTLSSCNSSSLGPTRPTIPEESAVACIESGQLRLVNGGGRCAGRVEIYHEGSWGTICDDSWDLSDAHVVCRQLGCGEAINATGSAHFGEGTGPIWLDEMKCNGKESRIWQCHSHGWGQQNCRHKEDAGVICSEFMSLRLTSEASREACAGRLEVFYNGAWGTVGKSSMSETTVGVVCRQLGCADKGKINPASLDKAMSIPMWVDNVQCPKGPDTLWQCPSSPWEKRLASPSEETWITCDNKIRLQEGPTSCSGRVEIWHGGSWGTVCDDSWDLDDAQVVCQQLGCGPALKAFKEAEFGQGTGPIWLNEVKCKGNESSLWDCPARRWGHSECGHKEDAAVNCTDISVQKTPQKATTGRSSRQSSFIAVGILGVVLLAIFVALFFLTKKRRQRQRLAVSSRGENLVHQIQYREMNSCLNADDLDLMNSSGGHSEPH

SEQ ID NO: 40 - protein, 1154 aa, Homo sapiens
MSKLRMVLLEDSGSADFRRHFVNLSPFTITVVLLLSACFVTSSLGGTDKELRLVDGENKCSGRVEVKVQEEWGTVCNNGWSMEAVSVICNQLGCPTAIKAPGWANSSAGSGRIWMDHVSCRGNESALWDCKHDGWGKHSNCTHQQDAGVTCSDGSNLEMRLTRGGNMCSGRIEIKFQGRWGTVCDDNFNIDHASVICRQLECGSAVSFSGSSNFGEGSGPIWFDDLICNGNESALWNCKHQGWGKHNCDHAEDAGVICSKGADLSLRLVDGVTECSGRLEVRFQGEWGTICDDGWDSYDAAVACKQLGCPTAVTAIGRVNASKGFGHIWLDSVSCQGHEPAIWQCKHHEWGKHYCNHNEDAGVTCSDGSDLELRLRGGGSRCAGTVEVEIQRLLGKVCDRGWGLKEADVVCRQLGCGSALKTSYQVYSKIQATNTWLFLSSCNGNETSLWDCKNWQWGGLTCDHYEEAKITCSAHREPRLVGGDIPCSGRVEVKHGDTWGSICDSDFSLEAASVLCRELQCGTVVSILGGAHFGEGNGQIWAEEFQCEGHESHLSLCPVAPRPEGTCSHSRDVGVVCSSKTQKTSLIGSYTVKGTGLGSHSCLFLKPCLLPGYTEIRLVNGKTPCEGRVELKTLGAWGSLCNSHWDIEDAHVLCQQLKCGVALSTPGGARFGKGNGQIWRHMFHCTGTEQHMGDCPVTALGASLCPSEQVASVICSGNQSQTLSSCNSSSLGPTRPTIPEESAVACIESGQLRLVNGGGRCAGRVEIYHEGSWGTICDDSWDLSDAHVVCRQLGCGEAINATGSAHFGEGTGPIWLDEMKCNGKESRIWQCHSHGWGQQNCRHKEDAGVICSEFMSLRLTSEASREACAGRLEVFYNGAWGTVGKSSMSETTVGVVCRQLGCADKGKINPASLDKAMSIPMWVDNVQCPKGPDTLWQCPSSPWEKRLASPSEETWITCDNKIRLQEGPTSCSGRVEIWHGGSWGTVCDDSWDLDDAQVVCQQLGCGPALKAFKEAEFGQGTGPIWLNEVKCKGNESSLWDCPARRWGHSECGHKEDAAVNCTDISVQKTPQKATTGRSSRQSSFIAVGILGVVLLAIFVALFFLTKKRRQRQRLAVSSRGENLVHQIQYREMNSCLNADDLDLMNSSGGHSEPH

SEQ ID NO: 41 - protein, 1337 aa, Homo sapiens; identical to SEQ ID NO: 17

SEQ ID NO: 42 - protein, 539 aa, Homo sapiens; identical to SEQ ID NO: 18

SEQ ID NO: 43 - protein, 2110 aa, Homo sapiens
CAGGCCGAGGCAGGGAGAACTCTCCACTCGGAGGAGGAGCTGGGGTCCTCTTCCATCCCGTCTTCATCCTGCCTGGCTGCGTGACCTCGGGAGGCACCATGCAGGAGCTGCATCTGCTCTGGTGGGCGCTTCTCCTGGGCCTGGCTCAGGCCTGCCCTGAGCCCTGCGACTGTGGGGAAAAGTATGGCTTCCAGATCGCCGACTGTGCCTACCGCGACCTAGAATCCGTGCCGCCTGGCTTCCCGGCCAATGTGACTACACTGAGCCTGTCAGCCAACCGGCTGCCAGGCTTGCCGGAGGGTGCCTTCAGGGAGGTGCCCCTGCTGCAGTCGCTGTGGCTGGCACACAATGAGATCCGCACGGTGGCCGCCGGAGCCCTGGCCTCTCTGAGCCATCTCAAGAGCCTGGACCTCAGCCACAATCTCATCTCTGACTTTGCCTGGAGCGACCTGCACAACCTCAGTGCCCTCCAATTGCTCAAGATGGACAGCAACGAGCTGACCTTCATCCCCCGCGACGCCTTCCGCAGCCTCCGTGCTCTGCGCTCGCTGCAACTCAACCACAACCGCTTGCACACATTGGCCGAGGGCACCTTCACCCCGCTCACCGCGCTGTCCCACCTGCAGATCAACGAGAACCCCTTCGACTGCACCTGCGGCATCGTGTGGCTCAAGACATGGGCCCTGACCACGGCCGTGTCCATCCCGGAGCAGGACAACATCGCCTGCACCTCACCCCATGTGCTCAAGGGTACGCCGCTGAGCCGCCTGCCGCCACTGCCATGCTCGGCGCCCTCAGTGCAGCTCAGCTACCAACCCAGCCAGGATGGTGCCGAGCTGCGGCCTGGTTTTGTGCTGGCACTGCACTGTGATGTGGACGGGCAGCCGGCCCCTCAGCTTCACTGGCACATCCAGATACCCAGTGGCATTGTGGAGATCACCAGCCCCAACGTGGGCACTGATGGGCGTGCCCTGCCTGGCACCCCTGTGGCCAGCTCCCAGCCGCGCTTCCAGGCCTTTGCCAATGGCAGCCTGCTTATCCCCGACTTTGGCAAGCTGGAGGAAGGCACCTACAGCTGCCTGGCCACCAATGAGCTGGGCAGTGCTGAGAGCTCAGTGGACGTGGCACTGGCCACGCCCGGTGAGGGTGGTGAGGACACACTGGGGCGCAGGTTCCATGGCAAAGCGGTTGAGGGAAAGGGCTGCTATACGGTTGACAACGAGGTGCAGCCATCAGGGCCGGAGGACAATGTGGTCATCATCTACCTCAGCCGTGCTGGGAACCCTGAGGCTGCAGTCGCAGAAGGGGTCCCTGGGCAGCTGCCCCCAGGCCTGCTCCTGCTGGGCCAAAGCCTCCTCCTCTTCTTCTTCCTCACCTCCTTCTAGCCCCACCCAGGGCTTCCCTAACTCCTCCCCTTGCCCCTACCAATGCCCCTTTAAGTGCTGCAGGGGTCTGGGGTTGGCAACTCCTGAGGCCTGCATGGGTGACTTCACATTTTCCTACCTCTCCTTCTAATCTCTTCTAGAGCACCTGCTATCCCCAACTTCTAGACCTGCTCCAAACTAGTGACTAGGATAGAATTTGATCCCCTAACTCACTGTCTGCGGTGCTCATTGCTGCTAACAGCATTGCCTGTGCTCTCCTCTCAGGGGCAGCATGCTAACGGGGCGACGTCCTAATCCAACTGGGAGAAGCCTCAGTGGTGGAATTCCAGGCACTGTGACTGTCAAGCTGGCAAGGGCCAGGATTGGGGGAATGGAGCTGGGGCTTAGCTGGGAGGTGGTCTGAAGCAGACAGGGAATGGGAGAGGAGGATGGGAAGTAGACAGTGGCTGGTATGGCTCTGAGGCTCCCTGGGGCCTGCTCAAGCTCCTCCTGCTCCTTGCTGTTTTCTGATGATTTGGGGGCTTGGGAGTCCCTTTGTCCTCATCTGAGACTGAAATGTGGGGATCCAGGATGGCTTCCTTCCTCTTACCCTTCCTCCCTCAGCCTGCAACCTCTATCCTGGAACCTGTCCTCCCTTTCTCCCCAACTATGCATCTGTTGTCTGCTCCTCTGCAAAGGCCAGCCAGCTTGGGAGCAGCAGAGAAATAAACAGCATTTCTGATGCC

SEQ ID NO: 44 - protein, 1464 aa, Homo sapiens
AGTACCGGGTACGCAGGGGTGCCTCAACCACACTCCGTCCACGGACTCTCCGTTATTTTAGGAGGTCCCTGGCCAAAGATTTATTTCTCTTGACAACCAAGGGCCTCCGTCTGGATTTCCAAGGAAGAATTTCCTCTGAAGCACCGGAACTTGCTACTACCAGCACCATGCCCTACCAATATCCAGCACTGACCCCGGAGCAGAAGAAGGAGCTGTCTGACATCGCTCACCGCATCGTGGCACCTGGCAAGGGCATCCTGGCTGCAGATGAGTCCACTGGGAGCATTGCCAAGCGGCTGCAGTCCATTGGCACCGAGAACACCGAGGAGAACCGGCGCTTCTACCGCCAGCTGCTGCTGACAGCTGACGACCGCGTGAACCCCTGCATTGGGGGTGTCATCCTCTTCCATGAGACACTCTACCAGAAGGCGGATGATGGGCGTCCCTTCCCCCAAGTTATCAAATCCAAGGGCGGTGTTGTGGGCATCAAGGTAGACAAGGGCGTGGTCCCCCTGGCAGGGACAAATGGCGAGACTACCACCCAAGGGTTGGATGGGCTGTCTGAGCGCTGTGCCCAGTACAAGAAGGACGGAGCTGACTTCGCCAAGTGGCGTTGTGTGCTGAAGATTGGGGAACACACCCCCTCAGCCCTCGCCATCATGGAAAATGCCAATGTTCTGGCCCGTTATGCCAGTATCTGCCAGCAGAATGGCATTGTGCCCATCGTGGAGCCTGAGATCCTCCCTGATGGGGACCATGACTTGAAGCGCTGCCAGTATGTGACCGAGAAGGTGCTGGCTGCTGTCTACAAGGCTCTGAGTGACCACCACATCTACCTGGAAGGCACCTTGCTGAAGCCCAACATGGTCACCCCAGGCCATGCTTGCACTCAGAAGTTTTCTCATGAGGAGATTGCCATGGCGACCGTCACAGCGCTGCGCCGCACAGTGCCCCCCGCTGTCACTGGGATCACCTTCCTGTCTGGAGGCCAGAGTGAGGAGGAGGCGTCCATCAACCTCAATGCCATTAACAAGTGCCCCCTGCTGAAGCCCTGGGCCCTGACCTTCTCCTACGGCCGAGCCCTGCAGGCCTCTGCCCTGAAGGCCTGGGGCGGGAAGAAGGAGAACCTGAAGGCTGCGCAGGAGGAGTATGTCAAGCGAGCCCTGGCCAACAGCCTTGCCTGTCAAGGAAAGTACACTCCGAGCGGTCAGGCTGGGGCTGCTGCCAGCGAGTCCCTCTTCGTCTCTAACCACGCCTATTAAGCGGAGGTGTTCCCAGGCTGCCCCCAACAACTCCAGGCCCTGCCCCCTCCCACTCTTGAAGAGGAGGCCGCCTCCTCGGGGCTCCAGGCTGGCTTGCCCGCGCTCTTTCTTCCCTCGTGACAGTGGTGTGTGGTGTCGTCTGTGAATGCTAAGTCCATCACCCTTTCCGGCACACTGCCAAATAAACAGCTATTTAAGGGGG

SEQ ID NO: 45 - protein, 1570 aa, Homo sapiens
CAGAATGACATCCCAGGATTACATAAACTGTCAGAGGCAGCCGAAGAGTTCACAAGTGTGAAGCCTGGAAGCCGGCGGGTGCCGCTGTGTAGGAAAGAAGCTAAAGCACTTCCAGAGCCTGTCCGGAGCTCAGAGGTTCGGAAGACTTATCGACCATGGTGAGTGTAGGGTCTTGGGGTCGAACGCGTGCCACTCGGGAGCCACAGGGGTTGGATGGGGCCTCCTAGACCTCTGCTCTCTCCCCAGGAGCGCGCGTCCTGCTTGTTGCTGCTGCTGCTGCCGCTGGTGCACGTCTCTGCGACCACGCCAGAACCTTGTGAGCTGGACGATGAAGATTTCCGCTGCGTCTGCAACTTCTCCGAACCTCAGCCCGACTGGTCCGAAGCCTTCCAGTGTGTGTCTGCAGTAGAGGTGGAGATCCATGCCGGCGGTCTCAACCTAGAGCCGTTTCTAAAGCGCGTCGATGCGGACGCCGACCCGCGGCAGTATGCTGACACGGTCAAGGCTCTCCGCGTGCGGCGGCTCACAGTGGGAGCCGCACAGGTTCCTGCTCAGCTACTGGTAGGCGCCCTGCGTGTGCTAGCGTACTCCCGCCTCAAGGAACTGACGCTCGAGGACCTAAAGATAACCGGCACCATGCCTCCGCTGCCTCTGGAAGCCACAGGACTTGCACTTTCCAGCTTGCGCCTACGCAACGTGTCGTGGGCGACAGGGCGTTCTTGGCTCGCCGAGCTGCAGCAGTGGCTCAAGCCAGGCCTCAAGGTACTGAGCATTGCCCAAGCACACTCGCCTGCCTTTTCCTACGAACAGGTTCGCGCCTTCCCGGCCCTTACCAGCCTAGACCTGTCTGACAATCCTGGACTGGGCGAACGCGGACTGATGGCGGCTCTCTGTCCCCACAAGTTCCCGGCCATCCAGAATCTAGCGCTGCGCAACACAGGAATGGAGACGCCCACAGGCGTGTGCGCCGCACTGGCGGCGGCAGGTGTGCAGCCCCACAGCCTAGACCTCAGCCACAACTCGCTGCGCGCCACCGTAAACCCTAGCGCTCCGAGATGCATGTGGTCCAGCGCCCTGAACTCCCTCAATCTGTCGTTCGCTGGGCTGGAACAGGTGCCTAAAGGACTGCCAGCCAAGCTCAGAGTGCTCGATCTCAGCTGCAACAGACTGAACAGGGCGCCGCAGCCTGACGAGCTGCCCGAGGTGGATAACCTGACACTGGACGGGAATCCCTTCCTGGTCCCTGGAACTGCCCTCCCCCACGAGGGCTCAATGAACTCCGGCGTGGTCCCAGCCTGTGCACGTTCGACCCTGTCGGTGGGGGTGTCGGGAACCCTGGTGCTGCTCCAAGGGGCCCGGGGCTTTGCCTAAGATCCAAGACAGAATAATGAATGGACTCAAACTGCCTTGGCTTCAGGGGAGTCCCGTCAGGACGTTGAGGACTTTTCGACCAATTCAACCCTTTGCCCCACCTTTATTAAAATCTTAAACAACGGTTCCGTGTCATTCATTTAACAGACCTTTATTGGATGTCTGCTATGTGCTGGGCACAGTACTGGATGGGGAATTC

SEQ ID NO: 46 - protein, 5929 aa, Homo sapiens
AGAGGCCCTCCGCGCCCCGAGCTCCAGCCGCACTGCCCCGATGGCTCCCTACCCCTGTGGCTGCCACATCCTGCTGCTGCTCTTCTGCTGCCTGGCGGCTGCCCGGGCCAACCTGCTGAACCTGAACTGGCTTTGGTTCAATAATGAGGACACCAGCCACGCAGCTACCACGATCCCTGAGCCCCAGGGGCCCCTGCCTGTGCAGCCCACAGCAGATACCACCACACACGTGACCCCCCGGAATGGTTCCACAGAGCCAGCGACAGCCCCTGGCAGCCCTGAGCCACCCTCAGAGCTGCTGGAAGATGGCCAGGACACCCCCACTTCTGCCGAGAGCCCGGACGCGCCAGAGGAGAACATTGCCGGTGTCGGAGCCGAGATCCTGAACGTGGCCAAAGGCATCCGGAGCTTCGTCCAGCTGTGGAATGACACTGTCCCCACTGAGAGCTTGGCCAGGGCGGAAACCCTGGTCCTGGAGACTCCTGTGGGCCCCCTTGCCCTCGCTGGGCCTTCCAGCACCCCCCAGGAGAATGGGACCACTCTCTGGCCCAGCCGTGGCATTCCTAGCTCTCCGGGCGCCCACACAACCGAGGCTGGCACCTTGCCTGCACCCACCCCATCGCCTCCGTCCCTGGGCAGGCCCTGGGCACCACTCACGGGGCCCTCAGTGCCACCACCATCTTCAGAGCGCATCAGCGAGGAGGTGGGGCTGCTGCAGCTCCTTGGGGACCCCCCGCCCCAGCAGGTCACCCAGACGGATGACCCCGACGTCGGGCTGGCCTACGTCTTTGGGCCAGATGCCAACAGTGGCCAAGTGGCCCGGTACCACTTCCCCAGCCTCTTCTTCCGTGACTTCTCACTGCTGTTCCACATCCGGCCAGCCACAGAGGGCCCAGGGGTGCTGTTCGCCATCACGGACTCGGCGCAGGCCATGGTCTTGCTGGGCGTGAAGCTCTCTGGGGTGCAGGACGGGCACCAGGACATCTCCCTGCTCTACACAGAACCTGGTGCAGGCCAGACCCACACAGCCGCCAGCTTCCGGCTCCCCGCCTTCGTCGGCCAGTGGACACACTTAGCCCTCAGTGTGGCAGGTGGCTTTGTGGCCCTCTACGTGGACTGTGAGGAGTTCCAGAGAATGCCGCTTGCTCGGTCCTCACGGGGCCTGGAGCTGGAGCCTGGCGCCGGGCTCTTCGTGGCTCAGGCGGGGGGAGCGGACCCTGACAAGTTCCAGGGGGTGATCGCTGAGCTGAAGGTGCGCAGGGACCCCCAGGTGAGCCCCATGCACTGCCTGGACGAGGAAGGCGATGACTCAGATGGGGCATTCGGAGACTCTGGCAGCGGGCTCGGGGACGCCCGGGAGCTTCTCAGGGAGGAGACGGGCGCGGCCCTAAAACCCAGGCTCCCCGCGCCACCCCCCGTCACCACGCCACCCTTGGCTGGAGGCAGCAGCACGGAAGATTCCAGAAGTGAAGAAGTCGAGGAGCAGACCACGGTGGCTTCGTTAGGAGCTCAGACACTTCCTGGCTCAGATTCTGTCTCCACGTGGGACGGGAGTGTCCGGACCCCTGGGGGCCGCGTGAAAGAGGGCGGCCTGAAGGGGCAGAAAGGGGAGCCAGGTGTTCCGGGCCCACCTGGCCGGGCAGGCCCCCCAGGATCCCCATGCCTACCTGGTCCCCCGGGTCTCCCGTGCCCAGTGAGTCCCCTGGGTCCTGCAGGCCCAGCGTTGCAAACTGTCCCCGGACCACAAGGACCCCCAGGGCCTCCGGGGAGGGACGGCACCCCTGGAAGGGACGGCGAGCCGGGCGACCCCGGTGAAGACGGAAAGCCGGGCGACACCGGGCCACAAGGCTTCCCTGGGACTCCAGGGGATGTAGGTCCCAAGGGAGACAAGGGAGACCCTGGGGTTGGAGAGAGAGGGCCCCCAGGACCCCAAGGGCCTCCAGGGCCCCCAGGACCCTCCTTCAGACACGACAAGCTGACCTTCATTGACATGGAGGGATCTGGCTTTGGGGGCGATCTGGAGGCCCTGCGGGGTCCTCGAGGCTTCCCTGGACCTCCCGGACCCCCCGGTGTCCCAGGCCTGCCCGGCGAGCCAGGCCGCTTTGGGGTGAACAGCTCCGACGTCCCAGGACCCGCCGGCCTTCCTGGTGTGCCTGGGCGCGAGGGTCCCCCCGGGTTTCCTGGCCTCCCGGGACCCCCAGGCCCTCCGGGAAGAGAGGGGCCCCCAGGAAGGACTGGGCAGAAAGGCAGCCTGGGTGAAGCAGGCGCCCCAGGACATAAGGGGAGCAAGGGAGCCCCCGGTCCTGCTGGTGCTCGTGGGGAGAGCGGCCTGGCAGGAGCCCCCGGACCTGCTGGACCACCAGGCCCCCCTGGGCCCCCTGGGCCCCCAGGACCAGGACTCCCCGCTGGATTTGATGACATGGAAGGCTCCGGGGGGCCCTTCTGGTCAACAGCCCGAAGCGCTGATGGGCCACAGGGACCTCCCGGCCTGCCGGGACTTAAGGGGGATCCTGGCGTGCCTGGGCTGCCGGGGGCGAAGGGAGAAGTTGGAGCAGATGGAATCCCCGGGTTCCCCGGCCTCCCTGGCAGAGAGGGCATTGCTGGGCCCCAGGGGCCAAAGGGAGACAGAGGCAGCCGGGGAGAAAAGGGAGATCCAGGGAAGGACGGAGTCGGGCAGCCGGGCCTCCCTGGCCCCCCCGGACCCCCGGGACCTGTGGTCTACGTGTCGGAGCAGGACGGATCCGTCCTGAGCGTGCCGGGACCTGAGGGCCGGCCGGGTTTCGCAGGCTTTCCCGGACCTGCAGGACCCAAGGGCAACCTGGGCTCTAAGGGCGAACGAGGCTCCCCGGGACCCAAGGGTGAGAAGGGTGAACCGGGCAGCATCTTCAGCCCCGACGGCGGTGCCCTGGGCCCTGCCCAGAAAGGAGCCAAGGGAGAGCCGGGCTTCCGAGGACCCCCGGGTCCATACGGACGGCCGGGGTACAAGGGAGAGATTGGCTTTCCTGGACGGCCGGGTCGCCCCGGGATGAACGGATTGAAAGGAGAGAAAGGGGAGCCGGGAGATGCCAGCCTTGGATTTGGCATGAGGGGAATGCCCGGCCCCCCAGGACCTCCAGGGCCCCCAGGCCCTCCAGGGACTCCTGTTTACGACAGCAATGTGTTTGCTGAGTCCAGCCGCCCCGGGCCTCCAGGATTGCCAGGGAATCAGGGCCCTCCAGGACCCAAGGGCGCCAAAGGAGAAGTGGGCCCCCCCGGACCACCAGGGCAGTTTCCGTTTGACTTTCTTCAGTTGGAGGCTGAAATGAAGGGGGAGAAGGGAGACCGAGGTGATGCAGGACAGAAAGGCGAAAGGGGGGAGCCCGGGGGCGGCGGTTTCTTCGGCTCCAGCCTGCCCGGCCCCCCCGGCCCCCCAGGCCCACGTGGCTACCCTGGGATTCCAGGTCCCAAGGGAGAGAGCATCCGGGGCCAGCCCGGCCCACCTGGACCTCAGGGACCCCCCGGCATCGGCTACGAGGGGCGCCAGGGCCCTCCCGGCCCCCCAGGCCCCCCAGGGCCCCCTTCATTTCCTGGCCCTCACAGGCAGACTATCAGCGTTCCCGGCCCTCCGGGCCCCCCTGGGCCCCCTGGGCCCCCTGGAACCATGGGCGCCTCCTCAGGGGTGAGGCTCTGGGCTACACGCCAGGCCATGCTGGGCCAGGTGCACGAGGTTCCCGAGGGCTGGCTCATCTTCGTGGCCGAGCAGGAGGAGCTCTACGTCCGCGTGCAGAACGGGTTCCGGAAGGTCCAGCTGGAGGCCCGGACACCACTCCCACGAGGGACGGACAATGAAGTGGCCGCCTTGCAGCCCCCCGTGGTGCAGCTGCACGACAGCAACCCCTACCCGCGGCGGGAGCACCCCCACCCCACCGCGCGGCCCTGGCGGGCAGATGACATCCTGGCCAGCCCCCCTCGCCTGCCCGAGCCCCAGCCCTACCCCGGAGCCCCGCACCACAGCTCCTACGTGCACCTGCGGCCGGCGCGACCCACAAGCCCACCCGCCCACAGCCACCGCGACTTCCAGCCGGTGCTCCACCTGGTTGCGCTCAACAGCCCCCTGTCAGGCGGCATGCGGGGCATCCGCGGGGCCGACTTCCAGTGCTTCCAGCAGGCGCGGGCCGTGGGGCTGGCGGGCACCTTCCGCGCCTTCCTGTCCTCGCGCCTGCAGGACCTGTACAGCATCGTGCGCCGTGCCGACCGCGCAGCCGTGCCCATCGTCAACCTCAAGGACGAGCTGCTGTTTCCCAGCTGGGAGGCTCTGTTCTCAGGCTCTGAGGGTCCGCTGAAGCCCGGGGCACGCATCTTCTCCTTTGACGGCAAGGACGTCCTGAGGCACCCCACCTGGCCCCAGAAGAGCGTGTGGCATGGCTCGGACCCCAACGGGCGCAGGCTGACCGAGAGCTACTGTGAGACGTGGCGGACGGAGGCTCCCTCGGCCACGGGCCAGGCCTCCTCGCTGCTGGGGGGCAGGCTCCTGGGGCAGAGTGCCGCGAGCTGCCATCACGCCTACATCGTGCTCTGCATTGAGAACAGCTTCATGACTGCCTCCAAGTAGCCACCGCCTGGATGCGGATGGCCGGAGAGGACCGGCGGCTCGGAGGAAGCCCCCACCGTGGGCAGGGAGCGGCCGGCCAGCCCCTGGCCCCAGGACCTGGCTGCCATACTTTCCTGTATAGTTCACGTTTCATGTAATCCTCAAGAAATAAAAGGAAGCCAAAGAGTGTATTTTTTTAAAAGTTTAAAACAGAAGCCTGATGCTGACATTCACCTGCCCCAACTCTCCCCTGACCTGTGAGCCCAGCTGGGTCAGGCAGGGTGCAGTATCATGCCCTGTGCAACCTCTTGGCCTGATCAGACCACGGCTCGATTTCTCCAGGATTTCCTGCTTTGGGAAGCCGTGCTCGCCCCAGCAGGTGCTGACTTCATCTCCCACCTAGCAGCACCGTTCTGTGCACAAAACCCAGACCTGTTAGCAGACAGGCCCCGTGAGGCAATGGGAGCTGAGGCCACACTCAGCACAAGGCCATCTGGGCTCCTCCAGGGTGTGTGCTCGCCCTGCGGTAGATGGGAGGGAGGCTCAGGTCCCTGGGGCTAGGGGGAGCCCCTTCTGCTCAGCTCTGGGCCATTCTCCACAGCAACCCCAGGCTGAAGCAGGTTCCCAAGCTCAGAGGCGCACTGTGACCCCCAGCTCCGGCCTGTCCTCCAACACCAAGCACAGCAGCCTGGGGCTGGCCTCCCAAATGAGCCATGAGATGATACATCCAAAGCAGACAGCTCCACCCTGGCCGAGTCCAAGCTGGGAGATTCAAGGGACCCATGAGTTGGGGTCTGGCAGCCTCCCATCCAGGGCCCCCATCTCATGCCCCTGGCTGGGACGTGGCTCAGCCAGCACTTGTCCAGCTGAGCGCCAGGATGGAACACGGCCACATCAAAGAGGCTGAGGCTGGCACAGGACATGCGGTAGCCAGCACACAGGGCAGTGAGGGAGGGCTGTCATCTGTGCACTGCCCATGGACAGGCTGGCTCCAGATGCAGGGCAGTCATTGGCTGTCTCCTAGGAAACCCATATCCTTACCCTCCTTGGGACTGAAGGGGAACCCCGGGGTGCCCACAGGCCGCCCTGCGGGTGAACAAAGCAGCCACGAGGTGCAACAAGGTCCTCTGTCAGTCACAGCCACCCCTGAGATCCGGCAACATCAACCCGAGTCATTCGTTCTGTGGAGGGACAAGTGGACTCAGGGCAGCGCCAGGCTGACCACAGCACAGCCAACACGCACCTGCCTCAGGACTGCGACGAAACCGGTGGGGCTGGTTCTGTAATTGTGTGTGATGTGAAGCCAATTCAGACAGGCAAATAAAAGTGACCTTTTACACTGAAAAAAAAAAAAAAAAA

SEQ ID NO: 47 - protein, 2474 aa, Homo sapiens
CTCAGCGCCCAGCCGCTTCCTGCCTGGATTCCACAGCTTCGCGCCGTGTACTGTCGCCCCATCCCTGCGCGCCCAGCCTGCCAAGCAGCGTGCCCCGGTTGCAGGCGTCATGCAGCGGGCGCGACCCACGCTCTGGGCCGCTGCGCTGACTCTGCTGGTGCTGCTCCGCGGGCCGCCGGTGGCGCGGGCTGGCGCGAGCTCGGGGGGCTTGGGTCCCGTGGTGCGCTGCGAGCCGTGCGACGCGCGTGCACTGGCCCAGTGCGCGCCTCCGCCCGCCGTGTGCGCGGAGCTGGTGCGCGAGCCGGGCTGCGGCTGCTGCCTGACGTGCGCACTGAGCGAGGGCCAGCCGTGCGGCATCTACACCGAGCGCTGTGGCTCCGGCCTTCGCTGCCAGCCGTCGCCCGACGAGGCGCGACCGCTGCAGGCGCTGCTGGACGGCCGCGGGCTCTGCGTCAACGCTAGTGCCGTCAGCCGCCTGCGCGCCTACCTGCTGCCAGCGCCGCCAGCTCCAGGAAATGCTAGTGAGTCGGAGGAAGACCGCAGCGCCGGCAGTGTGGAGAGCCCGTCCGTCTCCAGCACGCACCGGGTGTCTGATCCCAAGTTCCACCCCCTCCATTCAAAGATAATCATCATCAAGAAAGGGCATGCTAAAGACAGCCAGCGCTACAAAGTTGACTACGAGTCTCAGAGCACAGATACCCAGAACTTCTCCTCCGAGTCCAAGCGGGAGACAGAATATGGTCCCTGCCGTAGAGAAATGGAAGACACACTGAATCACCTGAAGTTCCTCAATGTGCTGAGTCCCAGGGGTGTACACATTCCCAACTGTGACAAGAAGGGATTTTATAAGAAAAAGCAGTGTCGCCCTTCCAAAGGCAGGAAGCGGGGCTTCTGCTGGTGTGTGGATAAGTATGGGCAGCCTCTCCCAGGCTACACCACCAAGGGGAAGGAGGACGTGCACTGCTACAGCATGCAGAGCAAGTAGACGCCTGCCGCAAGTTAATGTGGAGCTCAAATATGCCTTATTTTGCACAAAAGACTGCCAAGGACATGACCAGCAGCTGGCTACAGCCTCGATTTATATTTCTGTTTGTGGTGAACTGATTTTTTTTAAACCAAAGTTTAGAAAGAGGTTTTTGAAATGCCTATGGTTTCTTTGAATGGTAAACTTGAGCATCTTTTCACTTTCCAGTAGTCAGCAAAGAGCAGTTTGAATTTTCTTGTCGCTTCCTATCAAAATATTCAGAGACTCGAGCACAGCACCCAGACTTCATGCGCCCGTGGAATGCTCACCACATGTTGGTCGAAGCGGCCGACCACTGACTTTGTGACTTAGGCGGCTGTGTTGCCTATGTAGAGAACACGCTTCACCCCCACTCCCCGTACAGTGCGCACAGGCTTTATCGAGAATAGGAAAACCTTTAAACCCCGGTCATCCGGACATCCCAACGCATGCTCCTGGAGCTCACAGCCTTCTGTGGTGTCATTTCTGAAACAAGGGCGTGGATCCCTCAACCAAGAAGAATGTTTATGTCTTCAAGTGACCTGTACTGCTTGGGGACTATTGGAGAAAATAAGGTGGAGTCCTACTTGTTTAAAAAATATGTATCTAAGAATGTTCTAGGGCACTCTGGGAACCTATAAAGGCAGGTATTTCGGGCCCTCCTCTTCAGGAATCTTCCTGAAGACATGGCCCAGTCGAAGGCCCAGGATGGCTTTTGCTGCGGCCCCGTGGGGTAGGAGGGACAGAGAGACGGGAGAGTCAGCCTCCACATTCAGAGGCATCACAAGTAATGGCACAATTCTTCGGATGACTGCAGAAAATAGTGTTTTGTAGTTCAACAACTCAAGACGAAGCTTATTTCTGAGGATAAGCTCTTTAAAGGCAAAGCTTTATTTTCATCTCTCATCTTTTGTCCTCCTTAGCACAATGTAAAAAAGAATAGTAATATCAGAACAGGAAGGAGGAATGGCTTGCTGGGGAGCCCATCCAGGACACTGGGAGCACATAGAGATTCACCCATGTTTGTTGAACTTAGAGTCATTCTCATGCTTTTCTTTATAATTCACACATATATGCAGAGAAGATATGTTCTTGTTAACATTGTATACAACATAGCCCCAAATATAGTAAGATCTATACTAGATAATCCTAGATGAAATGTTAGAGATGCTATATGATACAACTGTGGCCATGACTGAGGAAAGGAGCTCACGCCCAGAGACTGGGCTGCTCTCCCGGAGGCCAAACCCAAGAAGGTCTGGCAAAGTCAGGCTCAGGGAGACTCTGCCCTGCTGCAGACCTCGGTGTGGACACACGCTGCATAGAGCTCTCCTTGAAAACAGAGGGGTCTCAAGACATTCTGCCTACCTATTAGCTTTTCTTTATTTTTTTAACTTTTTGGGGGGAAAAGTATTTTTGAGAAGTTTGTCTTGCAATGTATTTATAAATAGTAAATAAAGTTTTTACCATT

SEQ ID NO: 48 - protein, 822 aa, Homo sapiens
ACGGAACAGATCCGGGGACTCTCTTCCAGCCTCCGACCGCCCTCCGATTTCCTCTCCGCTTGCAACCTCCGGGACCATCTTCTCGGCCATCTCCTGCTTCTGGGACCTGCCAGCACCGTTTTTGTGGTTAGCTCCTTCTTGCCAACCAACCATGAGCTCCCAGATTCGTCAGAATTATTCCACCGACGTGGAGGCAGCCGTCAACAGCCTGGTCAATTTGTACCTGCAGGCCTCCTACACCTACCTCTCTCTGGGCTTCTATTTCGACCGCGATGATGTGGCTCTGGAAGGCGTGAGCCACTTCTTCCGCGAACTGGCCGAGGAGAAGCGCGAGGGCTACGAGCGTCTCCTGAAGATGCAAAACCAGCGTGGCGGCCGCGCTCTCTTCCAGGACATCAAGAAGCCAGCTGAAGATGAGTGGGGTAAAACCCCAGACGCCATGAAAGCTGCCATGGCCCTGGAGAAAAAGCTGAACCAGGCCCTTTTGGATCTTCATGCCCTGGGTTCTGCCCGCACGGACCCCCATCTCTGTGACTTCCTGGAGACTCACTTCCTAGATGAGGAAGTGAAGCTTATCAAGAAGATGGGTGACCACCTGACCAACCTCCACAGGCTGGGTGGCCCGGAGGCTGGGCTGGGCGAGTATCTCTTCGAAAGGCTCACTCTCAAGCACGACTAAGAGCCTTCTGAGCCCAGCGACTTCTGAAGGGCCCCTTGCAAAGTAATAGGGCTTCTGCCTAAGCCTCTCCCTCCAGCCAATAGGCAGCTTTCTTAACTATCCTAACAAGCCTTGGACCAAATGGAAATAAAGCTTTTTGATGC

SEQ ID NO: 49 - protein, 2691 aa, Homo sapiens
GCTTGCCCGTCGGTCGCTAGCTCGCTCGGTGCGCGTCGTCCCGCTCCATGGCGCTCTTCGTGCGGCTGCTGGCTCTCGCCCTGGCTCTGGCCCTGGGCCCCGCCGCGACCCTGGCGGGTCCCGCCAAGTCGCCCTACCAGCTGGTGCTGCAGCACAGCAGGCTCCGGGGCCGCCAGCACGGCCCCAACGTGTGTGCTGTGCAGAAGGTTATTGGCACTAATAGGAAGTACTTCACCAACTGCAAGCAGTGGTACCAAAGGAAAATCTGTGGCAAATCAACAGTCATCAGCTACGAGTGCTGTCCTGGATATGAAAAGGTCCCTGGGGAGAAGGGCTGTCCAGCAGCCCTACCACTCTCAAACCTTTACGAGACCCTGGGAGTCGTTGGATCCACCACCACTCAGCTGTACACGGACCGCACGGAGAAGCTGAGGCCTGAGATGGAGGGGCCCGGCAGCTTCACCATCTTCGCCCCTAGCAACGAGGCCTGGGCCTCCTTGCCAGCTGAAGTGCTGGACTCCCTGGTCAGCAATGTCAACATTGAGCTGCTCAATGCCCTCCGCTACCATATGGTGGGCAGGCGAGTCCTGACTGATGAGCTGAAACACGGCATGACCCTCACCTCTATGTACCAGAATTCCAACATCCAGATCCACCACTATCCTAATGGGATTGTAACTGTGAACTGTGCCCGGCTCCTGAAAGCCGACCACCATGCAACCAACGGGGTGGTGCACCTCATCGATAAGGTCATCTCCACCATCACCAACAACATCCAGCAGATCATTGAGATCGAGGACACCTTTGAGACCCTTCGGGCTGCTGTGGCTGCATCAGGGCTCAACACGATGCTTGAAGGTAACGGCCAGTACACGCTTTTGGCCCCGACCAATGAGGCCTTCGAGAAGATCCCTAGTGAGACTTTGAACCGTATCCTGGGCGACCCAGAAGCCCTGAGAGACCTGCTGAACAACCACATCTTGAAGTCAGCTATGTGTGCTGAAGCCATCGTTGCGGGGCTGTCTGTAGAGACCCTGGAGGGCACGACACTGGAGGTGGGCTGCAGCGGGGACATGCTCACTATCAACGGGAAGGCGATCATCTCCAATAAAGACATCCTAGCCACCAACGGGGTGATCCACTACATTGATGAGCTACTCATCCCAGACTCAGCCAAGACACTATTTGAATTGGCTGCAGAGTCTGATGTGTCCACAGCCATTGACCTTTTCAGACAAGCCGGCCTCGGCAATCATCTCTCTGGAAGTGAGCGGTTGACCCTCCTGGCTCCCCTGAATTCTGTATTCAAAGATGGAACCCCTCCAATTGATGCCCATACAAGGAATTTGCTTCGGAACCACATAATTAAAGACCAGCTGGCCTCTAAGTATCTGTACCATGGACAGACCCTGGAAACTCTGGGCGGCAAAAAACTGAGAGTTTTTGTTTATCGTAATAGCCTCTGCATTGAGAACAGCTGCATCGCGGCCCACGACAAGAGGGGGAGGTACGGGACCCTGTTCACGATGGACCGGGTGCTGACCCCCCCAATGGGGACTGTCATGGATGTCCTGAAGGGAGACAATCGCTTTAGCATGCTGGTAGCTGCCATCCAGTCTGCAGGACTGACGGAGACCCTCAACCGGGAAGGAGTCTACACAGTCTTTGCTCCCACAAATGAAGCCTTCCGAGCCCTGCCACCAAGAGAACGGAGCAGACTCTTGGGAGATGCCAAGGAACTTGCCAACATCCTGAAATACCACATTGGTGATGAAATCCTGGTTAGCGGAGGCATCGGGGCCCTGGTGCGGCTAAAGTCTCTCCAAGGTGACAAGCTGGAAGTCAGCTTGAAAAACAATGTGGTGAGTGTCAACAAGGAGCCTGTTGCCGAGCCTGACATCATGGCCACAAATGGCGTGGTCCATGTCATCACCAATGTTCTGCAGCCTCCAGCCAACAGACCTCAGGAAAGAGGGGATGAACTTGCAGACTCTGCGCTTGAGATCTTCAAACAAGCATCAGCGTTTTCCAGGGCTTCCCAGAGGTCTGTGCGACTAGCCCCTGTCTATCAAAAGTTATTAGAGAGGATGAAGCATTAGCTTGAAGCACTACAGGAGGAATGCACCACGGCAGCTCTCCGCCAATTTCTCTCAGATTTCCACAGAGACTGTTTGAATGTTTTCAAAACCAAGTATCACACTTTAATGTACATGGGCCGCACCATAATGAGATGTGAGCCTTGTGCATGTGGGGGAGGAGGGAGAGAGATGTACTTTTTAAATCATGTTCCCCCTAAACATGGCTGTTAACCCACTGCATGCAGAAACTTGGATGTCACTGCCTGACATTCACTTCCAGAGAGGACCTATCCCAAATGTGGAATTGACTGCCTATGCCAAGTCCCTGGAAAAGGAGCTTCAGTATTGTGGGGCTCATAAAACATGAATCAAGCAATCCAGCCTCATGGGAAGTCCTGGCACAGTTTTTGTAAAGCCCTTGCACAGCTGGAGAAATGGCATCATTATAAGCTATGAGTTGAAATGTTCTGTCAAATGTGTCTCACATCTACACGTGGCTTGGAGGCTTTTATGGGGCCCTGTCCAGGTAGAAAAGAAATGGTATGTAGAGCTTAGATTTCCCTATTGTGACAGAGCCATGGTGTGTTTGTAATAATAAAACCAAAGAAACATA

SEQ ID NO: 50 - protein, 2780 aa, Homo sapiens
GTGGGCGGACCGCGCGGCTGGAGGTGTGAGGATCCGAACCCAGGGGTGGGGGGTGGAGGCGGCTCCTGCGATCGAAGGGGACTTGAGACTCACCGGCCGCACGCCATGAGGGCCCTGTGGGTGCTGGGCCTCTGCTGCGTCCTGCTGACCTTCGGGTCGGTCAGAGCTGACGATGAAGTTGATGTGGATGGTACAGTAGAAGAGGATCTGGGTAAAAGTAGAGAAGGATCAAGGACGGATGATGAAGTAGTACAGAGAGAGGAAGAAGCTATTCAGTTGGATGGATTAAATGCATCACAAATAAGAGAACTTAGAGAGAAGTCGGAAAAGTTTGCCTTCCAAGCCGAAGTTAACAGAATGATGAAACTTATCATCAATTCATTGTATAAAAATAAAGAGATTTTCCTGAGAGAACTGATTTCAAATGCTTCTGATGCTTTAGATAAGATAAGGCTAATATCACTGACTGATGAAAATGCTCTTTCTGGAAATGAGGAACTAACAGTCAAAATTAAGTGTGATAAGGAGAAGAACCTGCTGCATGTCACAGACACCGGTGTAGGAATGACCAGAGAAGAGTTGGTTAAAAACCTTGGTACCATAGCCAAATCTGGGACAAGCGAGTTTTTAAACAAAATGACTGAAGCACAGGAAGATGGCCAGTCAACTTCTGAATTGATTGGCCAGTTTGGTGTCGGTTTCTATTCCGCCTTCCTTGTAGCAGATAAGGTTATTGTCACTTCAAAACACAACAACGATACCCAGCACATCTGGGAGTCTGACTCCAATGAATTTTCTGTAATTGCTGACCCAAGAGGAAACACTCTAGGACGGGGAACGACAATTACCCTTGTCTTAAAAGAAGAAGCATCTGATTACCTTGAATTGGATACAATTAAAAATCTCGTCAAAAAATATTCACAGTTCATAAACTTTCCTATTTATGTATGGAGCAGCAAGACTGAAACTGTTGAGGAGCCCATGGAGGAAGAAGAAGCAGCCAAAGAAGAGAAAGAAGAATCTGATGATGAAGCTGCAGTAGAGGAAGAAGAAGAAGAAAAGAAACCAAAGACTAAAAAAGTTGAAAAAACTGTCTGGGACTGGGAACTTATGAATGATATCAAACCAATATGGCAGAGACCATCAAAAGAAGTAGAAGAAGATGAATACAAAGCTTTCTACAAATCATTTTCAAAGGAAAGTGATGACCCCATGGCTTATATTCACTTTACTGCTGAAGGGGAAGTTACCTTCAAATCAATTTTATTTGTACCCACATCTGCTCCACGTGGTCTGTTTGACGAATATGGATCTAAAAAGAGCGATTACATTAAGCTCTATGTGCGCCGTGTATTCATCACAGACGACTTCCATGATATGATGCCTAAATACCTCAATTTTGTCAAGGGTGTGGTGGACTCAGATGATCTCCCCTTGAATGTTTCCCGCGAGACTCTTCAGCAACATAAACTGCTTAAGGTGATTAGGAAGAAGCTTGTTCGTAAAACGCTGGACATGATCAAGAAGATTGCTGATGATAAATACAATGATACTTTTTGGAAAGAATTTGGTACCAACATCAAGCTTGGTGTGATTGAAGACCACTCGAATCGAACACGTCTTGCTAAACTTCTTAGGTTCCAGTCTTCTCATCATCCAACTGACATTACTAGCCTAGACCAGTATGTGGAAAGAATGAAGGAAAAACAAGACAAAATCTACTTCATGGCTGGGTCCAGCAGAAAAGAGGCTGAATCTTCTCCATTTGTTGAGCGACTTCTGAAAAAGGGCTATGAAGTTATTTACCTCACAGAACCTGTGGATGAATACTGTATTCAGGCCCTTCCCGAATTTGATGGGAAGAGGTTCCAGAATGTTGCCAAGGAAGGAGTGAAGTTCGATGAAAGTGAGAAAACTAAGGAGAGTCGTGAAGCAGTTGAGAAAGAATTTGAGCCTCTGCTGAATTGGATGAAAGATAAAGCCCTTAAGGACAAGATTGAAAAGGCTGTGGTGTCTCAGCGCCTGACAGAATCTCCGTGTGCTTTGGTGGCCAGCCAGTACGGATGGTCTGGCAACATGGAGAGAATCATGAAAGCACAAGCGTACCAAACGGGCAAGGACATCTCTACAAATTACTATGCGAGTCAGAAGAAAACATTTGAAATTAATCCCAGACACCCGCTGATCAGAGACATGCTTCGACGAATTAAGGAAGATGAAGATGATAAAACAGTTTTGGATCTTGCTGTGGTTTTGTTTGAAACAGCAACGCTTCGGTCAGGGTATCTTTTACCAGACACTAAAGCATATGGAGATAGAATAGAAAGAATGCTTCGCCTCAGTTTGAACATTGACCCTGATGCAAAGGTGGAAGAAGAGCCCGAAGAAGAACCTGAAGAGACAGCAGAAGACACAACAGAAGACACAGAGCAAGACGAAGATGAAGAAATGGATGTGGGAACAGATGAAGAAGAAGAAACAGCAAAGGAATCTACAGCTGAAAAAGATGAATTGTAAATTATACTCTCACCATTTGGATCCTGTGTGGAGAGGGAATGTGAAATTTACATCATTTCTTTTTGGGAGAGACTTGTTTTGGATGCCCCCTAATCCCCTTCTCCCCTGCACTGTAAAATGTGGGATTATGGGTCACAGGAAAAAGTGGGTTTTTTAGTTGAATTTTTTTTAACATTCCTCATGAATGTAAATTTGTACTATTTAACTGACTATTCTTGATGTAAAATCTTGTCATGTGTATAAAAATAAAAAAGATCCCAAAT

SEQ ID NO: 51 - protein, 5470 aa, Homo sapiens
CCCGGGGTCACTCCTGCTGGACCTACTCCGACCCCCTAGGCCGGGAGTGAAGGCGGGACTTGTGCGGTTACCAGCGGAAATGCCTCGGGGTCAGAAGTCGCAGGAGAGATAGACAGCTGCTGAACCAATGGGACCAGCGGATGGGGCGGATGTTATCTACCATTGGTGAACGTTAGAAACGAATAGCAGCCAATGAATCAGCTGGGGGGGCGGAGCAGTGACGTTTATTGCGGAGGGGGCCGCTTCGAATCGGCGGCGGCCAGCTTGGTGGCCTGGGCCAATGAACGGCCTCCAACGAGCAGGGCCTTCACCAATCGGCGGCCTCCACGACGGGGCTGGGGGAGGGTATATAAGCCGAGTAGGCGACGGTGAGGTCGACGCCGGCCAAGACAGCACAGACAGATTGACCTATTGGGGTGTTTCGCGAGTGTGAGAGGGAAGCGCCGCGGCCTGTATTTCTAGACCTGCCCTTCGCCTGGTTCGTGGCGCCTTGTGACCCCGGGCCCCTGCCGCCTGCAAGTCGAAATTGCGCTGTGCTCCTGTGCTACGGCCTGTGGCTGGACTGCCTGCTGCTGCCCAACTGGCTGGCAAGATGAAGCTCTCCCTGGTGGCCGCGATGCTGCTGCTGCTCAGCGCGGCGCGGGCCGAGGAGGAGGACAAGAAGGAGGACGTGGGCACGGTGGTCGGCATCGACTTGGGGACCACCTACTCCTGGTAAGTGGGGTTGCGGATGAGGGGGACGGGGCGTGGCGCTGGCTGGCGTGAGAAGTGCGGTGCTGATGTCCCTCTGTCGGGTTTTTGCAGCGTCGGCGTGTTCAAGAACGGCCGCGTGGAGATCATCGCCAACGATCAGGGCAACCGCATCACGCCGTCCTATGTCGCCTTCACTCCTGAAGGGGAACGTCTGATTGGCGATGCCGCCAAGAACCAGCTCACCTCCAACCCCGAGAACACGGTCTTTGACGCCAAGCGGCTCATCGGCCGCACGTGGAATGACCCGTCTGTGCAGCAGGACATCAAGTTCTTGCCGTTCAAGGTTCGACCGGTTTTCCTCATCCAGTTAGAGAACGGGTGGGTGGTGGGAGTATTTAGAGTTATAAGTCTCTGGAAAAGTGTTGAGACAACAGTTGAAGGTTATAGACATGATGTATGTAATAACTTTAATACTATTAGTATGTTACAAAACTTAAGACAGTTGCTGTCGTACTGTCTACGATAGTTTAGGAATAAAAGACCGATTAAAACTGAACTTTGTAAGACACCTATACTCCCTGAAGTATTTCTAGTCAATTTGCAGCCCCAAGGGACCAAAATAAACCAAATTGTGGGGATGGTAGTGGGTCTTTTAAACTTTGAGATGTCATTGTATCTGTGTCTGAAAACAATAATTCTTTAAAATAGGTGGTTGAAAAGAAAACTAAACCATACATTCAAGTTGATATTGGAGGTGGGCAAACAAAGACATTTGCTCCTGAAGAAATTTCTGCCATGGTTCTCACTAAAATGAAAGAAACCGCTGAGGCTTATTTGGGAAAGAAGGTAAATATTTCTAGAACAATGTTAAGTATTTTTTGATCATTAGTATTCTCGGTTGGCTGTTATGTATAGAAGCCTTCGTGAAGGGTTTCAAAAATTTTAATCAGAATGGTATTCATGCTTGTCACGGTTTAATTATTGAGTCCCTTTACTATAAGCCAAACAAAAATAGACTTTTCATGTATTATTTAATGCTTACAATTCCAGGAACAATAAAATTTTATATGTTGTATTCATCAATAATTGGCTTAAAAACTAAAGTGATGGTTTGACTGTAATTTTTTTTTTTTGAGATGGAGTCTTGCTCTGTTGCCCAGGCTGGACTGCAGTGGCACGATCTCAGCTCACTGCAACCTCTGCCTCCCGGGTTAAGCAGCTCTCCTGCCTCAGCCTCCAAGTAATGGAACGACAGGCACACCACCACAGCTGGCTAATTTTTTTTTTTTTTTTTAATTTTCAGTAGAGACAGGGTTTCTCCACATTGCCAGGCTGGTCTTGAAATCCTGCCCTCAGGTTGATCCTCCTGCCTAGCCTCCCAAAGTGCTGGATTATAGGCAGAAGCCACCGCCTGGCCAGACTGTAATTTAAATAAGGGTTAAACTATGTGACAATACACTTAATTATCTTTATCCTTTTAGGTTACCCATGCAGTTGTTACTGTACCAGCCTATTTTAATGATGCCCAACGCCAAGCAACCAAAGACGCTGGAACTATTGCTGGCCTAAATGTTATGAGGATCATCAACGAGCCGTAAGTATGAAATTCAGGGATACGGCATATTTGCCAAATAGTGGAAATGTGAAGTACTGACAAAACTTTTCCCTTTTTCAATCTAATAGTACGGCAGCTGCTATTGCTTATGGCCTGGATAAGAGGGAGGGGGAGAAGAACATCCTGGTGTTTGACCTGGGTGGCGGAACCTTCGATGTGTCTCTTCTCACCATTGACAATGGTGTCTTCGAAGTTGTGGCCACTAATGGAGATACTCATCTGGGTGGAGAAGACTTTGACCAGCGTGTCATGGAACACTTCATCAAACTGTACAAAAAGAAGACGGGCAAAGATGTCAGGAAGGACAATAGAGCTGTGCAGAAACTCCGGCGCGAGGTAGAAAAGGCCAAGGCCCTGTCTTCTCAGCATCAAGCAAGAATTGAAATTGAGTCCTTCTATGAAGGAGAAGACTTTTCTGAGACCCTGACTCGGGCCAAATTTGAAGAGCTCAACATGGTATGTTCCTTGTTTTCTGCTTTGCTAATGAGATCTCCTTAGACTCTGAATTCAGGACATTGCATCTAGATACTTAGATAACAGACATCACAGTAACCATGTCTTTTTTCTAGGATCTGTTCCGGTCTACTATGAAGCCCGTCCAGAAAGTGTTGGAAGATTCTGATTTGAAGAAGTCTGATATTGATGAAATTGTTCTTGTTGGTGGCTCGACTCGAATTCCAAAGATTCAGCAACTGGTTAAAGAGTTCTTCAATGGCAAGGAACCATCCCGTGGCATAAACCCAGATGAAGCTGTAGCGTATGGTGCTGCTGTCCAGGCTGGTGTGCTCTCTGGTGATCAAGATACAGGTAGGTCATCATCGCAGCATCTTTCTTAGTGATTCAGTAGCTTGATGGAAGAGCTCGGTACCCCTATTGCTTTAGAAAATACCAGAATATGAGCAACAAGGTCACACAGCTAGTAAAGGGTATAAGTGAAGACAAGACTGGGGTAGTCTCCAAGATCATTAGCAACTGTTTAATTCACTGCCTTTAAAATGTGTGTGTTAGAACCTAACCAAATGTTAGAGAGATAAACTTTACATAGCTCATAGGGAGAACTTGAATTAAAAGTTAAATAACTTATCCTTACAGGTGACCTGGTACTGCTTCATGTATGTCCCCTTACACTTGGTATTGAAACTGTAGGAGGTGTCATGACCAAACTGATTCCAAGTAATACAGTGGTGCCTACCAAGAACTCTCAGATCTTTTCTACAGCTTCTGATAATCAACCAACTGTTACAATCAAGGTCTATGAAGGTAATTACCTTAAGTTTGGTTAATATCATGGCTTTTTTTTTGAGATGAAGTCTTGCTCTGTTGCCCAGGCTGGACTGCAGTGGCACGATCTCGGCTCACTGCAAATTCTGTCTCCCGGGTTCAAGTGATTCTCCTGCCTCAGCCTCCAGAGTAGCTGGATTACAGCCTGACCACCACACCTGGCTAATTTCTGTATTTTTAGTAGAGGATGGGCTTTCACCATGTTTCCCAGGCTGGTCTCCAACTCCTGACCTCAGGTCATCTGCCTGCCTCCACCGTCCCGAAAGTACTGGGATTATAGCGTGAGCCACCACGCCAGATCTATCTATCATGGCATATTTTAAAAGAACATGACTTAATATGTCCTATTGAAATGGCTAGGGAACTAAGTAACTGCTGTTTTCAGATGGAGGTCTTAATTTGAATAATGTTGATATTAGATATTTAGCATTCTTTTTTTTTTTTTTTTAATGGAGTCTTGCTCTGTCGCCTAGGCTGGGGTGCAGTGGCATGACTTGCAACCTCTGCCTCCCGAATAGCTGGGATTACAGGTGCCCACCATCACGCCCGGCTAAGTTTTGTATTTTTAGTAGAGGCGAGTTTCGCCATGTTGGCCAGGCTGGTCTTGAACCCCTAACCTCAGTGATCCCACGGTCACCGACCTGGCCTCCCAAAAGTACTGTACCCAGCCAATGATTAGCATTCTCACTAATAATAGCATCTGAGCTGGCTCCTAGAGTACAAGAAAAAGGAGTTCACAGTACTTTAAAATAGATAAAATTCAGTTGAGTTAGTAACCTAACTCATTGTTAGTACTAGTTGCTGCTCCTTGTAGACCAATATGAAATTACTTTTAGCTCGATAAAACCAAAAGTGTCACTTTATGCTTCAGACTGAAATGCGGGGATCTAGATGTGCTAATGCTTGTCAGTAACAACTAACAAGTTTTTCTGTATGTAACTTCTAGGTGAAAGACCCCTGACAAAAGACAATCATCTTCTGGGTACATTTGATCTGACTGGAATTCCTCCTGCTCCTCGTGGGGTCCCACAGATTGAAGTCACCTTTGAGATAGATGTGAATGGTATTCTTCGAGTGACAGCTGAAGACAAGGGTACAGGGAACAAAAATAAGATCACAATCACCAATGACCAGAATCGCCTGACACCTGAAGAAATCGAAAGGATGGTTAATGATGCTGAGAAGTTTGCTGAGGAAGACAAAAAGCTGAAGGAGCGCATTGATACTAGAAATGAGTTGGAAAGCTATGCCTATTCTCTAAAGAATCAGATTGGAGATAAAGAAAAGCTGGGAGGTAAACTTTCCTCTGAAGATAAGGAGACCATGGAAAAAGCTGTAGAAGAAAAGATTGAATGGCTGGAAAGCCACCAAGATGCTGACATTGAAGACTTCAAAGCTAAGAAGAAGGAACTGGAAGAAATTGTTCAACCAATTATCAGCAAACTCTATGGAAGTGCAGGCCCTCCCCCAACTGGTGAAGAGGATACAGCAGAAAAAGATGAGTTGTAGACACTGATCTGCTAGTGCTGTAATATTGTAAATACTGGACTCAGGAACTTTTGTTAGGAAAAAATTGAAAGAACTTAAGTCTCGAATGTAATTGGAATCTTCACCTCAGAGTGGAGTTGAAACTGCTATAGCCTAAGCGGCTGTTTACTGCTTTTCATTAGCAGTTGCTCACATGTCTTTGGGTGGGGGGGAGAAGAAGAATTGGCCATCTTAAAAAGCGGGTAAAAAACCTGGGTTAGGGTGTGTGTTCACCTTCAAAATGTTCTATTTAACAACTGGGTCATGTGCATCTGGTGTAGGAGGTTTTTTCTACCATAAGTGACACCAATAAATGTTTGTTATTTACACTGGTCTAATGTTTGTGAGAAGCTT

SEQ ID NO: 52 - protein, 2257 aa, Homo sapiens
AATCGAAAGTAGACTCTTTTCTGAAGCATTTCCTGGGATCAGCCTGACCACGCTCCATACTGGGAGAGGCTTCTGGGTCAAAGGACCAGTCTGCAGAGGGATCCTGTGGCTGGAAGCGAGGAGGCTCCACACGGCCGTTGCAGCTACCGCAGCCAGGATCTGGGCATCCAGGCACGGCCATGACCCCTCCGAGGCTCTTCTGGGTGTGGCTGCTGGTTGCAGGAACCCAAGGCGTGAATGATGGTGACATGCGGCTGGCCGATGGGGGCGCCACCAACCAGGGCCGCGTGGAGATCTTCTACAGAGGCCAGTGGGGCACTGTGTGTGACAACCTGTGGGACCTGACTGATGCCAGCGTCGTCTGCCGGGCCCTGGGCTTCGAGAACGCCACCCAGGCTCTGGGCAGAGCTGCCTTCGGGCAAGGATCAGGCCCCATCATGCTGGACGAGGTCCAGTGCACGGGAACCGAGGCCTCACTGGCCGACTGCAAGTCCCTGGGCTGGCTGAAGAGCAACTGCAGGCACGAGAGAGACGCTGGTGTGGTCTGCACCAATGAAACCAGGAGCACCCACACCCTGGACCTCTCCAGGGAGCTCTCGGAGGCCCTTGGCCAGATCTTTGACAGCCAGCGGGGCTGCGACCTGTCCATCAGCGTGAATGTGCAGGGCGAGGACGCCCTGGGCTTCTGTGGCCACACGGTCATCCTGACTGCCAACCTGGAGGCCCAGGCCCTGTGGAAGGAGCCGGGCAGCAATGTCACCATGAGTGTGGATGCTGAGTGTGTGCCCATGGTCAGGGACCTTCTCAGGTACTTCTACTCCCGAAGGATTGACATCACCCTGTCGTCAGTCAAGTGCTTCCACAAGCTGGCCTCTGCCTATGGGGCCAGGCAGCTGCAGGGCTACTGCGCAAGCCTCTTTGCCATCCTCCTCCCCCAGGACCCCTCGTTCCAGATGCCCCTGGACCTGTATGCCTATGCAGTGGCCACAGGGGACGCCCTGCTGGAGAAGCTCTGCCTACAGTTCCTGGCCTGGAACTTCGAGGCCTTGACGCAGGCCGAGGCCTGGCCCAGTGTCCCCACAGACCTGCTCCAACTGCTGCTGCCCAGGAGCGACCTGGCGGTGCCCAGCGAGCTGGCCCTACTGAAGGCCGTGGACACCTGGAGCTGGGGGGAGCGTGCCTCCCATGAGGAGGTGGAGGGCTTGGTGGAGAAGATCCGCTTCCCCATGATGCTCCCTGAGGAGCTCTTTGAGCTGCAGTTCAACCTGTCCCTGTACTGGAGCCACGAGGCCCTGTTCCAGAAGAAGACTCTGCAGGCCCTGGAATTCCACACTGTGCCCTTCCAGTTGCTGGCCCGGTACAAAGGCCTGAACCTCACCGAGGATACCTACAAGCCCCGGATTTACACCTCGCCCACCTGGAGTGCCTTTGTGACAGACAGTTCCTGGAGTGCACGGAAGTCACAACTGGTCTATCAGTCCAGACGGGGGCCTTTGGTCAAATATTCTTCTGATTACTTCCAAGCCCCCTCTGACTACAGATACTACCCCTACCAGTCCTTCCAGACTCCACAACACCCCAGCTTCCTCTTCCAGGACAAGAGGGTGTCCTGGTCCCTGGTCTACCTCCCCACCATCCAGAGCTGCTGGAACTACGGCTTCTCCTGCTCCTCGGACGAGCTCCCTGTCCTGGGCCTCACCAAGTCTGGCGGCTCAGATCGCACCATTGCCTACGAAAACAAAGCCCTGATGCTCTGCGAAGGGCTCTTCGTGGCAGACGTCACCGATTTCGAGGGCTGGAAGGCTGCGATTCCCAGTGCCCTGGACACCAACAGCTCGAAGAGCACCTCCTCCTTCCCCTGCCCGGCAGGGCACTTCAACGGCTTCCGCACGGTCATCCGCCCCTTCTACCTGACCAACTCCTCAGGTGTGGACTAGACGGCGTGGCCCAAGGGTGGTGAGAACCGGAGAACCCCAGGACGCCCTCACTGCAGGCTCCCCTCCTCGGCTTCCTTCCTCTCTGCAATGACCTTCAACAACCGGCCACCAGATGTCGCCCTACTCACCTGAGCGCTCAGCTTCAAGAAATTACTGGAAGGCTTCCACTAGGGTCCACCAGGAGTTCTCCCACCACCTCACCAGTTTCCAGGTGGTAAGCACCAGGACGCCCTCGAGGTTGCTCTGGGATCCCCCCACAGCCCCTGGTCAGTCTGCCCTTGTCACTGGTCTGAGGTCATTAAAATTACATTGAGGTTCCT

SEQ ID NO: 53 - protein, 1870 aa, Homo sapiens
CGGAGGAGGAGGCGAAGGAGACGGCAGGAGGCGGCGACGACGGTGCCCGGGCTCGGGCGCACGGCGGGGCCCGATTCGCGCGTCCGGGGCACGTTCCAGGGCGCGCGGGGCATGAAGCCGGCGGCGCGGGAGGCGCGGCTGCCTCCGCGCTCGCCCGGGCTGCGCTGGGCGCTGCCGCTGCTGCTGCTGCTGCTGCGCCTGGGCCAGATCCTGTGCGCAGGTGGCACCCCTAGTCCAATTCCTGACCCTTCAGTAGCAACTGTTGCCACAGGGGAAAATGGCATAACGCAGATCAGCAGTACAGCAGAATCCTTTCATAAACAGAATGGAACTGGAACACCTCAGGTGGAAACAAACACCAGTGAGGATGGTGAAAGCTCTGGAGCCAACGATAGTTTAAGAACACCTGAACAAGGATCTAATGGGACTGATGGGGCATCTCAAAAAACTCCCAGTAGCACTGGGCCCAGTCCTGTGTTTGACATTAAAGCTGTTTCCATCAGTCCAACCAATGTGATCTTAACTTGGAAAAGTAATGACACAGCTGCTTCTGAGTACAAGTATGTAGTAAAGCATAAGATGGAAAATGAGAAGACAATTACTGTTGTGCATCAACCATGGTGTAACATCACAGGCTTACGTCCAGCGACTTCATATGTATTCTCCATCACTCCAGGAATAGGCAATGAGACTTGGGGAGATCCCAGAGTCATAAAAGTCATCACAGAGCCGATCCCAGTTTCTGATCTCCGTGTTGCCCTCACGGGTGTGAGGAAGGCTGCTCTCTCCTGGAGCAATGGCAATGGCACCGCCTCCTGCCGGGTTCTTCTTGAAAGCATTGGAAGCCATGAGGAGTTGACTCAAGACTCAAGACTTCAGGTCAATATCTCGGGCCTGAAGCCAGGGGTTCAATACAACATCAACCCGTATCTTCTACAATCAAATAAGACAAAGGGAGACCCCTTGGGCACAGAAGGTGGCTTGGATGCCAGCAATACAGAGAGAAGCCGGGCAGGGAGCCCCACCGCCCCTGTGCATGATGAGTCCCTCGTGGGACCTGTGGACCCATCCTCCGGCCAGCAGTCCCGAGACACGGAAGTCCTGCTTGTCGGGTTAGAGCCTGGCACCCGATACAATGCCACCGTTTATTCCCAAGCAGCGAATGGCACAGAAGGACAGCCCCAGGCCATAGAGTTCAGGACAAATGCTATTCAGGTTTTTGACGTCACCGCTGTGAACATCAGTGCCACAAGCCTGACCCTGATCTGGAAAGTCAGCGATAACGAGTCGTCATCTAACTATACCTACAAGATACATGTGGCGGGGGAGACAGATTCTTCCAATCTCAACGTCAGTGAGCCTCGCGCTGTCATCCCCGGACTCCGCTCCAGCACCTTCTACAACATCACAGTGTGTCCTGTCCTAGGTGACATCGAGGGCACGCCGGGCTTCCTCCAAGTGCACACCCCCCCTGTTCCAGTTTCTGACTTCCGAGTGACAGTGGTCAGCACGACGGAGATCGGCTTAGCATGGAGCAGCCATGATGCAGAATCATTTCAGATGCATATCACACAGGAGGGAGCTGGCAATTCTCGGGTAGAAATAACCACCAACCAAAGTATTATCATTGGTGGCTTGTTCCCTGGAACCAAGTATTGCTTTGAAATAGTTCCAAAAGGACCAAATGGGACTGAAGGGGCATCTCGGACAGTTTGCAATAGAACTGGATGATTTGAACACCTGCCTGGAATTCCATCATCTGAAACAGAGTTGGCAGATAAGAATGGCCCCTATGCCAAATTTGGCTCATTGTCTGTTTTTGTAAATAAAGTTTTATTGGATCACAAAAAAAAAAAAAAAAAAAAAAAAA

SEQ ID NO: 54 - protein, 3128 aa, Homo sapiens
CCTTGTGCATTTGGTCTGAAGACAAAGATGACTGCAGGAGTGGGCAGGCCGGAGTGGGGGTGACCTGGCCTGTGCCAGGAAGGAGGAGGAGTCTGCAGCCCTGTGCGGTTCAACATCCATCAAGGAGTCCAGAGCAGGAGCCAGGCCAGGCGGGAGGGAAAGGCCCTGGGAGGGGCTCTCTAATCTCCCAGCCCCGACTCTGCCCCGTCACTGCCGCTGCTCCTCATTACTCGCTGGGGCTGCTGTCGCCTCCCCGAAGGGTGGCCTTGTCCAGATAGTGGCAAACCTCCCTGCCGTGGATGAGTCAGGAGCATTTTCTTAAGAGGAACATCACTGGAAAACAAAATGAGCGGGGACACAGAAACCAACAGCAGTGGCTGCATTTGTGGTACAGGCTCCTCTTCCAGAGCTCGCTGATGCCCACCTCAGACAGGCCTGACCACGGCACGGCTGGTGGGATTTGCCAGTCACCTCAACCAGCCAGTTCCACCCTCAGCTTCTCTCAGAAGGGAGCACCACACTCCTCAAGCTCAGTGAATGTATCCCGGCATGGGTGGGGCCAGAGCCTGTGATATCTCGAGGTGGGCTCGGCAGGACACCGGGGTGTGGAAGGGGGAAGCGAGCACCTGACTCAGACAGCGCGGGAGCTCGCAGGAGTCACGAGGCCACAGCGACTTCATTGTCTGACTGGGCCTGGACCTATAAACTTCCCACCTCAGCCTTGGGCCAAGCCTGGAAGATAAAAATGGAGCACCCCATGGCGCCCCTCACTCAGATTCTCCCCTGGGCTTCTCCCACGCAGCCCCAGAAGAGGACACACCAGCCCCAGAGTTAGCCCCAGAGGCCCCTGAGCCTCCTGAAGAGCCCCGCCTAGGAGTGCTGACCGTGACCGACACAACCCCAGACTCCATGCGCCTCTCGTGGAGCGTGGCCCAGGGCCCCTTTGATTCCTTCGTGGTCCAGTATGAGGACACGAACGGGCAGCCCCAGGCCTTGCTCGTGGACGGCGACCAGAGCAAGATCCTCATCTCAGGCCTGGAGCCCAGCACCCCCTACAGGTTCCTCCTCTATGGCCTCCATGAAGGGAAGCGCCTGGGGCCCCTCTCAGCTGAGGGCACCACAGGGCTGGCTCCTGCTGGTCAGACCTCAGAGGAGTCAAGGCCCCGCCTGTCCCAGCTGTCTGTGACTGACGTGACCACCAGTTCACTGAGGCTCAACTGGGAGGCCCCACCGGGGGCCTTCGACTCCTTCCTGCTCCGCTTTGGGGTTCCATCACCAAGCACTCTGGAGCCGCATCCGCGTCCACTGCTGCAGCGCGAGCTGATGGTGCCGGGGACGCGGCACTCGGCCGTGCTCCGGGACCTGCGTTCCGGGACTCTGTACAGCCTGACACTGTATGGGCTGCGAGGACCCCACAAGGCCGACAGCATCCAGGGAACCGCCCGCACCCTCAGCCCAGTTCTGGAGAGCCCCCGTGACCTCCAATTCAGTGAAATCAGGGAGACCTCAGCCAAGGTCAACTGGATGCCCCCACCATCCCGGGCGGACAGCTTCAAAGTCTCCTACCAGCTGGCGGACGGAGGGGAGCCTCAGAGTGTGCAGGTGGATGGCCAGGCCCGGACCCAGAAACTCCAGGGGCTGATCCCAGGCGCTCGCTATGAGGTGACCGTGGTCTCGGTCCGAGGCTTTGAGGAGAGTGAGCCTCTCACAGGCTTCCTCACCACGGTTCCTGACGGTCCCACACAGTTGCGTGCACTGAACTTGACCGAGGGATTCGCCGTGCTGCACTGGAAGCCCCCCCAGAATCCTGTGGACACCTATGACGTCCAGGTCACAGCCCCTGGGGCCCCGCCTCTGCAGGCGGAGACCCCAGGCAGCGCGGTGGACTACCCCCTGCATGACCTTGTCCTCCACACCAACTACACCGCCACAGTGCGTGGCCTGCGGGGCCCCAACCTCACTTCCCCAGCCAGCATCACCTTCACCACAGGGCTAGAGGCCCCTCGGGACTTGGAGGCCAAGGAAGTGACCCCCCGCACCGCCCTGCTCACTTGGACTGAGCCCCCAGTCCGGCCCGCAGGCTACCTGCTCAGCTTCCACACCCCTGGTGGACAGAACCAGGAGATCCTGCTCCCAGGAGGGATCACATCTCACCAGCTCCTTGGCCTCTTTGGGTCCACCTCCTACAATGCACGGCTCCAGGCCATGTGGGGCCAGAGCCTCCTGCCGCCCGTGTCCACCTCTTTCACCACGGGTGGGCTGCGGATCCCCTTCCCCAGGGACTGCGGGGAGGAGATGCAGAACGGAGCCGGTGCCTCCAGGACCAGCACCATCTTCCTCAACGGCAACCGCGAGCGGCCCCTGAACGTGTTTTGCGACATGGAGACTGATGGGGGCGGCTGGCTGGTGTTCCAGCGCCGCATGGATGGACAGACAGACTTCTGGAGGGACTGGGAGGACTATGCCCATGGTTTTGGGAACATCTCTGGAGAGTTCTGGCTGGGCAATGAGGCCCTGCACAGCCTGACACAGGCAGGTGACTACTCCATCCGCGTGGACCTGCGGGCTGGGGACGAGGCTGTGTTCGCCCAGTACGACTCCTTCCACGTAGACTCGGCTGCGGAGTACTACCGCCTCCACTTGGAGGGCTACCACGGCACCGCAGGGGACTCCATGAGCTACCACAGCGGCAGTGTCTTCTCTGCCCGTGATCGGGACCCCAACAGCTTGCTCATCTCCTGCGCTGTCTCCTACCGAGGGGCCTGGTGGTACAGGAACTGCCACTACGCCAACCTCAACGGGCTCTACGGGAGCACAGTGGACCATCAGGGAGTGAGCTGGTACCACTGGAAGGGCTTCGAGTTCTCGGTGCCCTTCACGGAAATGAAGCTGAGACCAAGAAACTTTCGCTCCCCAGCGGGGGGAGGCTGAGCTGCTGCCCACCTCTCTCGCACCCCAGTATGACTGCCGAGCACTGAGGGGTCGCCCCGAGAGAAGAGCCAGGGTCCTTCACCACCCAGCCGCTGGAGGAAGCCTTCTCTGCCAGCGATCTCGCAGCACTGTGTTTACAGGGGGGAGGGGAGGGGTTCGTACAGGAGCAATAAAGGAGAAACTGAGGTACCCGAAAA

SEQ ID NO: 55 - protein, 743 aa, Homo sapiens
GGGCTCAATTTCCTAACGCTCCCCTCCCCATCCCCATGCCACCTCCACGAGCAGCGGCGTCCAGCCTCCTCCCGCCCGAACGTGCTCGAGGGGCGGGCAGTCGACCTTTATTGTCTGGGGAGCACCTGGCAGGTGGCGGGCCCGTGCCCTAACGTGTGCGTGGTGCCCAGCTTCACAAAGCGAGCGGGCAGCACCTCCTTGGTCCGGGAACGCCTCAGCCTGGCCGTCCACATCCCAGGGGTGGAAAGGTGGAGAGAGAAAGGGGCTCCGGAGTCAAGAGCGGGGAGAGAGGGCGCGCGCGCCCTCCTCCTCCCGGCGGGCACAGCCCCCCGGCATTAACACGTCGAAAGAGCAGGGGCCAGACGCCGCCGGGAAGAAGCGAGACCCGGGCGGGCGCGAGGGAGGGGAGGCGAGGAGGGGCGTGGCCGGCGCGCAGAGGGAGGGCGCTGGGAGGAGGGGCTGCTGCTCGCCGCTCGCGGCTCTGGGGGCTCGGCTTTGCCGCGCTCGCTGCACTTGGGCGAGAGCTGGAACGTGGACCAGAGCTCGGATCCCATCGCAGCTACCGCGATGAGAGGCGCTCGCGGCGCCTGGGATTTTCTCTGCGTTCTGCTCCTACTGCTTCGCGTCCAGACAGGTGGGACACCGCGGCTGGCACCCCGACCGTGCGACTACTCGGCGAAGCCTGTGCCCGGGAGGTGGTACCCGCCAGGGTGCATCCGGAGAGAGGACTGCGGGCCCTCAGT

SEQ ID NO: 56 - protein, 6947 aa, Homo sapiens
TCTAGATTTATGAGCTTATTTCCTCATGCCCTCTCCCTGCCTTCACCTCTAGCTTGTACCCTGCACGACCTGTTTGCTACACACAGTCCCTCCACAGAGCCATGCTTCTTGCCTCTGCACTGCTTCTCATGTGCTTTCCTCTTCTCTGAAAAGCTCCCCCTTTCCCCTATTCCTTTCTCCTGATGAACTCTTAGCCATCTCGAAAAACCCAGGCCACTTGTCATCCCTAGAGGCCTTTTCTACCATTATTCCTCTTCTCCACAACCTTGGTGCTTTGTGCTGTGTGGGAACGTTTCTTAATGCATGTATTTGCTCTTGTTCTGTCATCCCTCTAGATGAAAAGCTTGTTGAGATCAGGAACTGTATCTTACTCTCCTTTGTGTTTCTAGGGCTCATAGATGTTGAATGAATGCCTAATTATTTAAATGATAGAATATTGGATTGGAAGTTAGGAAATCAGGTTCCATGTTGGTTCTGCTTTTGACTATGCCATACCAGGCTCATTTGAAAATTTTCTCCCACCTCCAAAATAGGAACACTTGAGATGCTTTATTATTTGCATATTTTCTTTCCACTCTTGATACTTCTGTCTAAATCAGTGAGGCAGGGCATGATTCCTAGTTTTCAGGAAACTGCACTGGTCTTTTAGTAATGCAGTTTACTAAAGAAGAGTAAATCTCACTTGTTACTGAATGTCAGTGACTTCAAAAAGTTTGTGGGAAAAATGGAATTAAAATATAAAAATAAAAACTGTAAACTTTATTTCTCAAAATAAGCTCTATCAAGTTTAAGACACTTTTGCCCATGATGATACCAACCTTTTAGTTCATCCCTAAAGAACTGAGGGTCCTGTGAATTGAACCACGTCAAATGCGGTCTTTTACATTATTAACAGAAATGAGTGCCCTTTAAAGATTTTTTTAAGATTAGGAAACAAGAATAAGTCAGAAGGAGCCAAATCAGGACCATAAGGTCCTAATGGCTTCCCATCAAAATGCTCACTAAATAGCCCTCGGATGAAAGGAATGAGGAGGAACATTGTCATGCTGGAGAAGGACTCTGGTGAAGCTTTCTTGGGCGATTTTCTGCTAAAGCTTTGGCTGACTTTCTGAAAACACATAAAAAGCAAACGTTACTGTTCTTTGGTTCTCCAGAAAATCAACAAGCAAAATGCCTTGGAGCATCCAAAAAAACATGACCTGTGCCCTTGACCAGTTCACTTTGGCTTTGACTGGACCACTTCCATCTCTTGGTAGCCATTGCTTTGATGTGTTTTCAGGTTCATACTGGTAAAACCATGTTTTATCTGCAGTGGCAGTTCTTCAAAGTAATGCTCTAGGATCTTGATCCCACCTGTTAAAAATGTCCATTGAAAGCTCTTCTCTTGTCTGCAGCTGATCTGTGTGCAATGGTTTTGGCACCGATCGAATGGAAAGTTTGCTCAGCTTTAATTTTTCAGTCAGGATTGTGTAAGCTGACCCAACTGAGATGTCTGTGGTATTGGCTGTTGGTTCTGCTGTTTATTTGCGATCTTCTTCAGTTAAGACATGAACAAGATACAAATTTTCCTGGCAAATTGATGTGAATAGTCTGCCCTGAGGGCTTCAACATTGTTTCATTCCTTCTTGAAACAAGTTATCCATTTGTAAACTGCTGATTTCTTTGGGACATTATCCCCATAATTTTTTTGTAAAGCATCAGCGGTTTTACCATTCTTCCATCCAAGCTTCACCGTAAATTTGCTATTTTTTCTGCCTTCAATTTTAGCAAAATTCATATTGCTGTTACAGGGGTTCTTTTAAAACTGATGTCTTGTCCTTCTTAGTGCCTCATACTGGATCCTGTTCATACAAGTTACTACAAGTTTATTTTGGTGCAAAAAAATGGTGAAATCCTTGCATAATTTTTTTCATAATACACGTTTTCCATGAGCTTTTTGAAGATTTCTTATATATATGTATCTTTTCCAACGCATGAAGCATTATTGAGGACAAAAATAGTCTTAAATCATAAAAAAGATTATATCCAATATACTAGAAGGTCTGCCTTTCAATTAACTCTATGTAACAATTTCCTAGTCCCCCAGCCTGTGGGTCTCTTGCTGGTAGCTTCACAGGTAGTCCCAGAATAGAGGGGAAAAACGGCAGTGTCACACGGAAGTGGGGGAGGCAGGGAGCTGAGTGCCTGGAGCTGCATGAGGCAGGTGTTTCCTCTCGTGAATACCCACAAAACTGGGATAAAATGTTTCCCTTCTGTGGCCTGCTCTCTAGTCAGAAAGCTTACTGGGATGAGAACAGACAGTGCTCTTACCCCTAGATATCTCTTCTTTCATTAATTCACTTCATTTCTCCAAGTACTTTCTGATGGTGGTCATGGTTACAATTCCAAAGCAGAAAATAATAGAGGGGAGATTTGTTTTTTTTAAATCAAAATGAGGAAAGGCACATCTGAAGAAGAGACAAATATGTACATTTTTCTGAAGGTAACTATTACACATATTCACTTTTTTTTTGAATTGTGGAATTGTTCATGAGTATGTAAACATAGAGAGAGTAATATGAACCCTGGGTGTCTATCTATCAGCTTTGACAATTGTCAACAGCTCTGTTTCCCTTCTTGTTTTATGTCTGCTTTTAAACTTCTAAAAAATATTTTAAAAATTTATACCACAAAGTCATCAGTCATTCCATAGACTGAGAGAGAGACACAGTTTAGGCAGTTTAGGCAGGGTGTAAAAGGATACCAGAAGTGCTGCCATACTTCATTCTCATATGAATAAGTCATTATGGGAGGACAGGAAAGCATGCTACAAGACAGGGGAGAAAGAGACCCACTGCGGAAGAAACTTGTATCACCAATAAAATGTGCATCTGACTTTTGGACAGGGATAGATTCCTCAGCTCAGCTTCTACTTTGCTATGAATATCTCGAAAAGCAAATCGTCCTACAGATTGTAAAAGGTTGCTAATCAGTGAAATACGTTACAGGGAATTTTCACATTGATTATGAATGGAAATTATTTTGTGTCTGAGAGAATATGTACAATTTTACCTTGTCTGATAATGTGAATTATAAAATGTTTTACATAAGAAATAAACCAATTTCATTATAAGTAACATTTTAAACCATTCTTAGTACTTACTAATTTGTGTTCTTCTTACAGGATATAAGTATCCAGTATATGGTGTCCAGTGGCATCCAGAGAAAGCACCTTATGAGTGGAAGAATTTGGATGGCATTTCCCATGCACCTAATGCTGTGAAAACCGCATTTTATTTAGCAGAGTTTTTTGTTAATGAAGGTAATATGAGGGTACATAATTTTGTTATTCTGGGGTAGTTTTGAAGAAAATTGCCCTTATCTGAACTTTTGCCTACCCTTTTGCTCTATAAATGTTTTGTAAGTTCTATAGGTTTAACTTTAAAGAATAATACAAATGTTAAATAATGTGAAAGCCCTAAAATCAAAGTGTAAGGTATTCTAATAAAACCAGGACAGTTACTTCAATTATCATACATGCTTCAGTGGGCAGAATTCTTGAACAACAGTGTGAAGAATGTTGAGAGTTTTTTTTTTGGTTTCTTTTTCTTTGTTATTTGTTTTTTGACAGGATCTTGCTCTGTCGCCCAGGCTGAAATGCAGTGATGTGATCATAGCTTATTGCAGCCTCAAACTCCTGGGCTCAGGGGATCCTCCTGCCTCGGCATCCTGAGTAGCTGGGACTACAGGTGCAGACTACCACACCAAGCTCTTTTTTTTTGGATACTTTTAATTTAGATTTTTCCCCATTACTCTCCATTTCTTAGAATAATGCTTTAATTCTAACAGTGTCTGAGAATTAGGTGTTACTTTTCCAAGACAGTGATACAAATTGAATATATACCCACCAGTTTGTGATTTTAAGGCTACCTCTCTGTAGGCATTGGCATACTGGAGAAAGCAAATAAACTCTGCCTGCTGTTTGGTGATGAAAACACAGACATATTCATGCTGTGTTATGTTTGTGGGAAAAATCGAGAATTTGGTTGTAGATGCCTATTTCTTAGTTGAGCATTATAGGTACAGTAAGTCCTACGATTTAAGCAGAACTGTGTGTAGCAGGTCCTTGAACAACACTGTTTACTTTGAAGTCGTTTCATTATAACATTGTTAGAAAAAAATTGGTTTTGTTATACATCGTTGTGCTTAAAAGTACTACAAGAACCTATCGATGACGTTAAGTGAAGACTAGCTGTGTAAGACAGAGGTACAAAAACAACTTGTAAACGGTAGAGATCACTTTGGTGAGGTATAGCCATTTAAAGACTTAAGTGAACTTTGCTTTCATTCCATCTCCAAGCTTGCCCTAAGTTTTTATCAACTCTCCTGCCATTGCTGGGAAGTCAAGTACTTCCTACTGAGTTCACTCTGCTTTAGAATCATGCAGAGCTGAGTGGATGGTTTTATGACAAAAACTCCAAATTAAAAAAAAAAAGTATCCCATATACAGTATTAGTCCAAAGGAACATTTTCATGAGTGCGTGGAGTGAATGAGGGCAGCAGTGGCAGTGCCGCATTTGCTGCAGTAGTAGTCATGTGGCATTTGGTCTATGTGGTCTTTTATCTTCCAACATTCTTTCTGAAAATGCCGTAAGAGCCTGTATTTACTTTGACTTTGGGAGCTTTAGGAGCTCTCACCTCCTCACATTCCAGCTTTCATCATGCCAAACTTCTCACTGTGCCTCCTGGTTTTTCATAATGCTGCCTTACCAGTGAAAATGTCTCACTTCTCTGTCTGCCTCAGCTTCACCAGTTTCTCCATCTTTTTTACTCTTGTAGCATCCAGTGATGTACACCATATACCATAAAAACATTTTTATCATATGATTCTGTGTGGTTACGAGGCTGAGCTTTTTGAGTGTTAGGACCTGTTCTGTTTATATTTCCATCCCCAGGCTGTGTTATCAAGTCTTGTGTACACATAGCCACTTGGTAGGTATTTGAATGAGTTGCGGAGTGAGCATAGCATGGGATATGCTGCAGGGGGAGTACAGCACAGCTGCTGTGGCCATGCGCGACTGTGCCATAAATCGGGCACTGCTTTATTTGGGGAAATTTTGTCAAGCATTTGCCTCCCTCCCTTCCTTGGTTCCTTCTTCTTCTTCTTTTTTTTTTTTTTTGGAAAGTAAGTTTGTTAGAGAAGTAAAGAAAAAAAAAGATGGCTGTTCTATAGGAAGAGCAGTCGCATTTCTCTTCTTGTTGATATTTTCCCACTTAATAATGCTGATTGCAGGAAGAAATATTATAAAATAGTCTCTTGAAGATTTTGTCATCTGATCTTTTTAAAAATTAACTTTTTTTCTTGCAGCTCGGAAAAACAACCATCATTTTAAATCTGAATCTGAAGAGGAGAAAGCATTGATTTATCAGTTCAGTCCAATTTATACTGGAAATATTTCTTCATTTCAGCAATGTTACATATTTGATTGAAAGTCTTCAATTTGTTAACAGAGCAAATTTGAATAATTCCATGATTAAACTGTTAGAATAACTTGCTACTCATGGCAAGATTAGGAAGTCACAGATTCTTTTCTAATAATGTGCCTGGCTCTGATTCTTCATTCTGTATGTGACTATTTATATAACATTAGATAATTAAATAGTGAGACATAAATAGAGTGTTTTTCATGGAAAAGCCTTCCTATATCTGAAGATTGAAAAACATAAATTTACTGAAATACAAATATTTCTTCTAATTGATTTGCTTGGGAAATAAATACCATCCCTACCGTGCCCACTCCATCCTCCTTGCTGAAAAAGAAAATAGTCTTTTAAAATCCTACCAATTGTTCATCTTGTTCATGGTGACGTCTCCGTCCTTTGGGTCTGAGGAGTATTTGTGTGTGTGTGTGTGTGTGTGTGTGTGTGTGTGTAGGTATGTGTGTATAGGTATGTGTGTGCATGTGTGTATCTACTCTTCTGCCCTGTGTTAACTTCATATTTAAAGCGTACACATCCTGAAAACAGAGTCTGTGTCTTGAACTTTTTATCTTTCACAATGTCCATAATGTCTAGCCCAGCAGGCCCTCAGTAAGTAATTGTCACTAATTATAAGTTTTTTTCCCATGGAAAATAATTTAAAAGCTGTCATATATTTATTTTGGTACACTTTAATGTATTTTTCTTTTTTTTTTTTTAAGATGGAGCATCTCTCTCTTGTTGCCCAGGCTGGAGTGCAATGCTGCAATCTCAGCTCACTGCAACCTCCGCTTCCTGGGTTCAAGCGATTCTCCTGCCTCAGCCTCCTGAGTAGCTGGGATTACAAGCATGTGCCATCACACCCAGCTAAATTTTGTATTTTTAGTAGAGATGGGGTTTCGCCATGTTGGCCAGGCTGGTCTCAAACTCCTGACCTCAGGTGATCTACCAGCCTCGGCCTCCCAAAGCGCTGGGATTACAGGCGTGAGCCACTGTGCCCAGCCAACATTAATGTATTTTTCAATCCGTGCTACTCTCCTCCACCCCTCACCATCCCATATAACCCTCAGAAGTATGAAATTTAGGAACTCCTTGAGGACAACCAAGCTGCTGGAAGGAAGAGAGAGAGGGTTTGCTGAGCTGTGTCTGGTAAATGGTGTTTATGCATCTGTTCTCTGTGGGCTTCCAGAGCTTCTGCAAGAGAAGGGGAAACAGGAAACTGATTGGGAATGATATTGGAGGGCATCGTGGATGATTTTACCTGCAACAAGAGAAGAACAATCACCTGCAGACACTGAGCTAAGCCATAATCTTTGGGGAGTGAGGACAAATAGCACATAGAAATTGGAAGAGATTAATACATTTAATTAACCAAGAAAGAACCTTACTAGAAATGTGGCAGATTTAGTTTCTGTCCATGAATATGAAGATTCTTTGTTGAGTCTTACTGTTGAATGTGTCTGGCTAAGTTTTTGTCTCCCACCTCTAGA

SEQ ID NO: 57 - protein, 3671 aa, Homo sapiens
AGTACTCGGTGTTCCTGAGGATGCTGTGCATGGCCTACAACGACTTCTTTCTAGAGGACAACAAGTGACCAGGGCTGCCCTCCACCCTCACCCTCCACCCTTTGCTGCTGACCTCGGCTGCTCCTCTCACAGACCCTCTTTGGCCCCTGCCCTCCTCTCCCTCCCAGATGGACCCTTCCATGGGAGGAAATAAAGTTTCCATCGCAGGTGCTGGGAGTCTGGTTTTGAAGCTGTCTTGTCTACCTTGGCCTGGGGAGAGGGGAGCACAGGAAGGGTCTCTCCTTGAGTGGGTTGAGACAGCTTCTGCCTCTGGGGGTTAGGGTCCTGGGCTCCCACTGCATTCCTCTCCTTCTTTGGTGTGGACGTCATTGGTTTTGTCATGGCTTAGTTTTGCCTGCCTGGAAAATGGGGAAGTTAGGCCAGGCGGGAACTCTGCAAGGATGCAGAGGAAGTTAAGAGGGAAAGTTGCTTTGAGAGGAGGACACTGGGAGGGGTTGGGAGTGGCTCCTGAGGGCGGTGATAGGCAGGCAGGCCTGACTTGTCCACAGCTCACCCGGAGGCCACCTTGGCAGCACCTGTAGGAAGGGCATGTCTGGCCTCCACACCAGCCCCCTCCCTCTTCACCATTTCCCCTTCAATAGCACCACTCTCATCATCTATGGGGGACAGTGCTTTCTTCTCTCCCTGCCTCCTCCATCAAAATCTTTTCTCAGGGGAGGGTCTGAAAAGGCCTTCACTCCCCCGTAAATAACGAATGGTGCTTACAGGGCTGGGCTCCCACGTGCATGCACATTAACACCAAAGGTGCTGTAGTGAATGGAATTTGGGGCACTGAGGGGAAGGCGTGGAGGTGTTGGTAGGAACTTGTTGCTGGTGGGGGATGGGCGCCGTAGATATCCTTTACACCACTGGCTACTCCCCCTATCTCCTCTGGGGTGACCCTGAGTATCCTCTGTGGGACACCGGCATCCTGTGAGGCGCCCTCCTTGCCCACATTGACGCTGCGCTGGCTCGAGGGTCACATTCACGGTCTGGCAGAGGAAGCAGGGGTGACCGCCGCAGTCCTCCTCCTGCTCCCCTTGCCGAGTCACGTGTCACGAAGAGCAAACTGAGCAAACTGAGCTGCGCAGATGAGGGGAGACTCGTCACCAGGCGTGCAGTGGGCACTGCTGGGCTCCCCCATCCCGTCCTAACCCGGAACAGCCCCGGGCAGGAGGCGTGGAAAGTCGAGGGGGTAAACCGCGAATGTGCGTTGTGTAAGCCACGGCGCAGGGTGGGGCGCGGGCGGGACTTGGGCGGGCGGGGTGGGCTTGGCCGAGCTGGCCTCCGGGGCACCGACCGCTATAAGGCCAGTCGGACTGCGACACAGCCCATCCCCTCGACCGCTCGCGTCGCATTTGGCCGCCTCCCTACCGGTGAGTTCTCTCCAGGAGCCCTGGGTACTTTCCAGGGCCAGCTGCCCTCACGCTGGGGGTCCAGCCATCCCCTGCCCAGTTCAGCCGCTGGATCCAGACTGGGGCCATCTGTGGCGCTCCCCCGCTGGAGGGATAGTCAGGAGCAGCAGTGCTGTGCCAGGCAGGCCTTGGGCTAAGGGATCGCAATGGGGTGTGCTCTTTTGGGGTGCGGAAGGGAGTGCCCTGGGTGTGTCATTGCCACCATGTGTGGCCCTGTGAAGCTGTGTTTAAGCTGCCTTTGCAGCCTCCATTCCCCTCCCCTGCCCAGCCATACTCCTCAACTTCTGGATCCCCTGAAGGACAGTTCTCAGCTGTGCCCAAAGCTACTGTTCCTATATGCTTCTTAGAATCCTTAAGCCACCTCTCTTGCCTTGGCCCTAGTGTGCTCTCTCCTTCCCCTTCAGCCCTGGGCTGTCTCCTGATGCCATTGTGTGTGGCCTGAGACTGGGTGGTTCCAAAGGAGGCGGGGCTAGTGCAGGCAGCATTATTGGGGTGTGTGGGTGAGAAGTCCTTGCTCCCATGGCACTGACTAGGCCCTCTGCTGCCAGCTCCAAGCCCAGCCCTCAGCCATGGCATGCCCCCTGGATCAGGCCATTGGCCTCCTCGTGGCCATCTTCCACAAGTACTCCGGCAGGGAGGGTGACAAGCACACCCTGAGCAAGAAGGAGCTGAAGGAGCTGATCCAGAAGGAGCTCACCATTGGCTCGGTGAGTGGCCTCCTCCCCAGGACCCCTTTTCCCACCCTTGTCCTTTGGAAGCAAGGATTAGGGGAGAGAGAGGTGCCAGGTGCATCTGACTCACATTTACCCACATTCTGAGGCCCTGGTCCACATGTAGACCCTGAGCTGTAGACCCACTCTCCCAGCGGGTAGGGGATGCTTCCAGCCGGATATCCATCTCTCCAAATGAGGACCAGTAACTGAGAAGTATCTGAGGAGAAGCAATGCCAAAGTGACATGGGTCCTTGGTGATGAGGGAGCACAGAGCCACTTGCAGAGAGGATTGCCTAGGAGGGGGAAGGGGAAGAATCCAGGGTTGTCATCACCACTGAGTATGGATTTCACATTCTAACACATTAGAAGCTGCAGGATGCTGAAATTGCAAGGCTGATGGAAGACTTGGACCGGAACAAGGACCAGGAGGTGAACTTCCAGGAGTATGTCACCTTCCTGGGGGCCTTGGCTTTGATCTACAATGAAGCCCTCAAGGGCTGAAAATAAATAGGGAAGATGGAGACACCCTCTGGGGGTCCTCTCTGAGTCAAATCCAGTGGTGGGTAATTGTACAATAAATTTTTTTTGGTCAAATTTACCCTTGCGTCTTGGCTTCCGAATGATTTCTGTTCCTCCTTGGCTTAGTGGGACACCAGCCATTGGAAGATTTGCTCACGGTCAACCTCTGAAAATGACTCATTGACTCGCCAGGCCAGAGGACCCACCCTGACAAGGCTGCCTCTAGCGCGTAAGGTGCCTTTATGTGAATGAGGAGAGATGCCCCTCTTGGCAACGCCATCCTAAGGAAAGGCTCAAGTGGTTTCCAGTAGAGAGAGTCCTGGGATGAGCTTGGAGATGGAAATGGTCCTTTGGGCCGGGATGTGATGGGGTTTGGGGGCCTGGAAGTGAGGCAGAGATAGTTCCAGAGGCTCCCAGATGTGTTTTGCTCTGGGTGTGGCAAGAGGGGCCTTGGGGTGGGGCAAGTCCCTTTCTCATCACAGCGCAGGGGTTAGATAGGGCACATCTGAGATGCCTGAGGCTTGGCTCAGGGAGTTTCCTACACCAGTGAGGACGCTGTGTGACTGAGTCTACTGCGGCTGCCCAGGTCCCAGGTGGAGTGGGGGAGGCACACTCTTGGAGTGTGTCCCGTCATTCAGGGTGAGGGCTTTTTGTTGGAACGGTGGTCTGAGGAGCTGGCAGCTGCACCAACACGTGAACCACGGGGTGTTCAGTAATGGGGCGGGGTATCCCTGCAGCCTCAGCGTAATGACTCACCCGGCACTTCCACGGGATCCAGCCTGGATCTCAGCCCCCATCAGAGAAGATGACTAATTGAATCATTGTCCATCATCTGGATTAGTGTTTTAAGGCAGAAGGGAAGAGGATAAGGAGGGTAAACGCTGTTTCCGGGTGATGCCACATCATTAAGCCTCTCTAGGCCTAGTCCGAGCTGGGCAAGTTTACCTCTAGCTTCTGGGGAAGAGATCTTGACTTTAGATGGAGA

SEQ ID NO: 58 - protein, 1570 aa, Homo sapiens; identical to SEQ ID NO: 45

SEQ ID NO: 59 - protein, 1490 aa, Homo sapiens
GGACGCTGGATTAGAAGGCAGCAAAAAAAGATCTGTGCTGGCTGGAGCCCCCTCAGTGTGCAGGCTTAGAGGGACTAGGCTGGGTGTGGAGCTGCAGCGTATCCACAGGCCCCAGGATGCAGGCCCTGGTGCTACTCCTCTGCATTGGAGCCCTCCTCGGGCACAGCAGCTGCCAGAACCCTGCCAGCCCCCCGGAGGAGGGCTCCCCAGACCCCGACAGCACAGGGGCGCTGGTGGAGGAGGAGGATCCTTTCTTCAAAGTCCCCGTGAACAAGCTGGCAGCGGCTGTCTCCAACTTCGGCTATGACCTGTACCGGGTGCGATCCAGCATGAGCCCCACGACCAACGTGCTCCTGTCTCCTCTCAGTGTGGCCACGGCCCTCTCGGCCCTCTCGCTGGGAGCGGACGAGCGAACAGAATCCATCATTCACCGGGCTCTCTACTATGACTTGATCAGCAGCCCAGACATCCATGGTACCTATAAGGAGCTCCTTGACACGGTCACTGCCCCCCAGAAGAACCTCAAGAGTGCCTCCCGGATCGTCTTTGAGAAGAAGCTRCGCATAAAATCCAGCTTTGTGGCACCTCTGGAAAAGTCATATGGGACCAGGCCCAGAGTCCTGACGGGCAACCCTCGCTTGGACCTGCAAGAGATCAACAACTGGGTGCAGGCGCAGATGAAAGGGAAGCTCGCCAGGTCCACAAAGGAAATTCCCGATGAGATCAGCATTCTCCTTCTCGGTGTGGCGCACTTCAAGGGGCAGTGGGTAACAAAGTTTGACTCCAGAAAGACTTCCCTCGAGGATTTCTACTTGGATGAAGAGAGGACCGTGAGGGTCCCCATGATGTCGGACCCTAAGGCTGTTTTACGCTATGGCTTGGATTCAGATCTCAGCTGCAAGATTGCCCAGCTGCCCTTGACCGGAAGCATGAGTATCATCTTCTTCCTGCCCCTGAAAGTGACCCAGAATTTGACCTTGATAGAGGAGAGCCTCACCTCCGAGTTCATTCATGACATAGACCGAGAACTGAAGACCGTGCAGGCGGTCCTCACTGTCCCCAAGCTGAAGCTGAGTTACGAAGGCGAAGTCACCAAGTCCCTGCAGGAGATGAAGCTGCAATCCTTGTTTGATTCACCAGACTTTAGCAAGATCACAGGCAAACCCATCAAGCTGACTCAGGTGGAACACCGGGCTGGCTTTGAGTGGAACGAGGATGGGGCGGGAACCACCCCCAGCCCAGGGCTGCAGCCTGCCCACCTCACCTTCCCGCTGGACTATCACCTTAACCAGCCTTTCATCTTCGTACTGAGGGACACAGACACAGGGGCCCTTCTCTTCATTGGCAAGATTCTGGACCCCAGGGGCCCCTAATATCCCAGTTTAATATTCCAATACCCTAGAAGAAAACCCGAGGGACAGCAGATTCCACAGGACACGAAGGCTGCCCCTGTAAGGTTTCAATGCATACAATAAAAGAGCTTTATCCCT

SEQ ID NO: 60 - protein, 2566 aa, Homo sapiens
GGCACGAGTTGTGCTCCTCGCTTGCCTGTTCCTTTTCCACGCATTTTCCAGGATAACTGTGACTCCAGGCCCGCAATGGATGCCCTGCAACTAGCAAATTCGGCTTTTGCCGTTGATCTGTTCAAACAACTATGTGAAAAGGAGCCACTGGGCAATGTCCTCTTCTCTCCAATCTGTCTCTCCACCTCTCTGTCACTTGCTCAAGTGGGTGCTAAAGGTGACACTGCAAATGAAATTGGACAGGTTCTTCATTTTGAAAATGTCAAAGATATACCCTTTGGATTTCAAACAGTAACATCGGATGTAAACAAACTTAGTTCCTTTTACTCACTGAAACTAATCAAGCGGCTCTACGTAGACAAATCTCTGAATCTTTCTACAGAGTTCATCAGCTCTACGAAGAGACCCTATGCAAAGGAATTGGAAACTGTTGACTTCAAAGATAAATTGGAAGAAACGAAAGGTCAGATCAACAACTCAATTAAGGATCTCACAGATGGCCACTTTGAGAACATTTTAGCTGACAACAGTGTGAACGACCAGACCAAAATCCTTGTGGTTAATGCTGCCTACTTTGTTGGCAAGTGGATGAAGAAATTTCCTGAATCAGAAACAAAAGAATGTCCTTTCAGACTCAACAAGACAGACACCAAACCAGTGCAGATGATGAACATGGAGGCCACGTTCTGTATGGGAAACATTGACAGTATCAATTGTAAGATCATAGAGCTTCCTTTTCAAAATAAGCATCTCAGCATGTTCATCCTACTACCCAAGGATGTGGAGGATGAGTCCACAGGCTTGGAGAAGATTGAAAAACAACTCAACTCAGAGTCACTGTCACAGTGGACTAATCCCAGCACCATGGCCAATGCCAAGGTCAAACTCTCCATTCCAAAATTTAAGGTGGAAAAGATGATTGATCCCAAGGCTTGTCTGGAAAATCTAGGGCTGAAACATATCTTCAGTGAAGACACATCTGATTTCTCTGGAATGTCAGAGACCAAGGGAGTGGCCCTATCAAATGTTATCCACAAAGTGTGCTTAGAAATAACTGAAGATGGTGGGGATTCCATAGAGGTGCCAGGAGCACGGATCCTGCAGCACAAGGATGAATTGAATGCTGACCATCCCTTTATTTACATCATCAGGCACAACAAAACTCGAAACATCATTTTCTTTGGCAAATTCTGTTCTCCTTAAGTGGCATAGCCCATGTTAAGTCCTCCCTGACTTTTCTGTGGATGCCGATTTCTGTAAACTCTGCATCCAGAGATTCATTTTCTAGATACAATAAATTGCTAATGTTGCTGGATCAGGAAGCCGCCAGTACTTGTCATATGTAGCCTTCACACAGATAGACCTTTTTTTTTTTCCAATTCTATCTTTTGTTTCCTTTTTTCCCATAAGACAATGACATACGCTTTTAATGAAAAGGAATCACGTTAGAGGAAAAATATTTATTCATTATTTGTCAAATTGTCCGGGGTAGTTGGCAGAAATACAGTCTTCCACAAAGAAAATTCCTATAAGGAAGATTTGGAAGCTCTTCTTCCCAGCACTATGCTTTCCTTCTTTGGGATAGAGAATGTTCCAGACATTCTCGCTTCCCTGAAAGACTGAAGAAAGTGTAGTGCATGGGACCCACGAAACTGCCCTGGCTCCAGTGAAACTTGGGCACATGCTCAGGCTACTATAGGTCCAGAAGTCCTTATGTTAAGCCCTGGCAGGCAGGTGTTTATTAAAATTCTGAATTTTGGGGATTTTCAAAAGATAATATTTTACATACACTGTATGTTATAGAACTTCATGGATCAGATCTGGGGCAGCAACCTATAAATCAACACCTTAATATGCTGCAACAAAATGTAGAATATTCAGACAAAATGGATACATAAAGACTAAGTAGCCCATAAGGGGTCAAAATTTGCTGCCAAATGCGTATGCCACCAACTTACAAAAACACTTCGTTCGCAGAGCTTTTCAGATTGTGGAATGTTGGATAAGGAATTATAGACCTCTAGTAGCTGAAATGCAAGACCCCAAGAGGAAGTTCAGATCTTAATATAAATTCACTTTCATTTTTGATAGCTGTCCCATCTGGTCATGTGGTTGGCACTAGACTGGTGGCAGGGGCTTCTAGCTGACTCGCACAGGGATTCTCACAATAGCCGATATCAGAATTTGTGTTGAAGGAACTTGTCTCTTCATCTAATATGATAGCGGGAAAAGGAGAGGAAACTACTGCCTTTAGAAAATATAAGTAAAGTGATTAAAGTGCTCACGTTACCTTGACACATAGTTTTTCAGTCTATGGGTTTAGTTACTTTAGATGGCAAGCATGTAACTTATATTAATAGTAATTTGTAAAGTTGGGTGGATAAGCTATCCCTGTTGCCGGTTCATGGATTACTTCTCTATAAAAAATATATATTTACCAAAAAATTTTGTGACATTCCTTCTCCCATCTCTTCCTTGACATGCATTGTAAATAGGTTCTTCTTGTTCTGAGATTCAATATTGAATTTCTCCTATGCTATTGACAATAAAATATTATTGAACTACC

SEQ ID NO: 61 - protein, 2602 aa, Homo sapiens
GCCGTGTCGCCACCATGGCTCCGCACCGCCCCGCGCCCGCGCTGCTTTGCGCGCTGTCCCTGGCGCTGTGCGCGCTGTCGCTGCCCGTCCGCGCGGCCACTGCGTCGCGGGGGGCGTCCCAGGCGGGGGCGCCCCAGGGGCGGGTGCCCGAGGCGCGGCCCAACAGCATGGTGGTGGAACACCCCGAGTTCCTCAAGGCAGGGAAGGAGCCTGGCCTGCAGATCTGGCGTGTGGAGAAGTTCGATCTGGTGCCCGTGCCCACCAACCTTTATGGAGACTTCTTCACGGGCGACGCCTACGTCATCCTGAAGACAGTGCAGCTGAGGAACGGAAATCTGCAGTATGACCTCCACTACTGGCTGGGCAATGAGTGCAGCCAGGATGAGAGCGGGGCGGCCGCCATCTTTACCGTGCAGCTGGATGACTACCTGAACGGCCGGGCCGTGCAGCACCGTGAGGTCCAGGGCTTCGAGTCGGCCACCTTCCTAGGCTACTTCAAGTCTGGCCTGAAGTACAAGAAAGGAGGTGTGGCATCAGGATTCAAGCACGTGGTACCCAACGAGGTGGTGGTGCAGAGACTCTTCCAGGTCAAAGGGCGGCGTGTGGTCCGTGCCACCGAGGTACCTGTGTCCTGGGAGAGCTTCAACAATGGCGACTGCTTCATCCTGGACCTGGGCAACAACATCCACCAGTGGTGTGGTTCCAACAGCAATCGGTATGAAAGACTGAAGGCCACACAGGTGTCCAAGGGCATCCGGGACAACGAGCGGAGTGGCCGGGCCCGAGTGCACGTGTCTGAGGAGGGCACTGAGCCCGAGGCGATGCTCCAGGTGCTGGGCCCCAAGCCGGCTCTGCCTGCAGGTACCGAGGACACCGCCAAGGAGGATGCGGCCAACCGCAAGCTGGCCAAGCTCTACAAGGTCTCCAATGGTGCAGGGACCATGTCCGTCTCCCTCGTGGCTGATGAGAACCCCTTCGCCCAGGGGGCCCTGAAGTCAGAGGACTGCTTCATCCTGGACCACGGCAAAGATGGGAAAATCTTTGTCTGGAAAGGCAAGCAGGCAAACACGGAGGAGAGGAAGGCTGCCCTCAAAACAGCCTCTGACTTCATCACCAAGATGGACTACCCCAAGCAGACTCAGGTCTCGGTCCTTCCTGAGGGCGGTGAGACCCCACTGTTCAAGCAGTTCTTCAAGAACTGGCGGGACCCAGACCAGACAGATGGCCTGGGCTTGTCCTACCTTTCCAGCCATATCGCCAACGTGGAGCGGGTGCCCTTCGACGCCGCCACCCTGCACACCTCCACTGCCATGGCCGCCCAGCACGGCATGGATGACGATGGCACAGGCCAGAAACAGATCTGGAGAATCGAAGGTTCCAACAAGGTGCCCGTGGACCCTGCCACATATGGACAGTTCTATGGAGGCGACAGCTACATCATTCTGTACAACTACCGCCATGGTGGCCGCCAGGGGCAGATAATCTATAACTGGCAGGGTGCCCAGTCTACCCAGGATGAGGTCGCTGCATCTGCCATCCTGACTGCTCAGCTGGATGAGGAGCTGGGAGGTACCCCTGTCCAGAGCCGTGTGGTCCAAGGCAAGGAGCCCGCCCACCTCATGAGCCTGTTTGGTGGGAAGCCCATGATCATCTACAAGGGCGGCACCTCCCGCGAGGGCGGGCAGACAGCCCCTGCCAGCACCCGCCTCTTCCAGGTCCGCGCCAACAGCGCTGGAGCCACCCGGGCTGTTGAGGTATTGCCTAAGGCTGGTGCACTGAACTCCAACGATGCCTTTGTTCTGAAAACCCCCTCAGCCGCCTACCTGTGGGTGGGTACAGGAGCCAGCGAGGCAGAGAAGACGGGGGCCCAGGAGCTGCTCAGGGTGCTGCGGGCCCAACCTGTGCAGGTGGCAGAAGGCAGCGAGCCAGATGGCTTCTGGGAGGCCCTGGGCGGGAAGGCTGCCTACCGCACATCCCCACGGCTGAAGGACAAGAAGATGGATGCCCATCCTCCTCGCCTCTTTGCCTGCTCCAACAAGATTGGACGTTTTGTGATCGAAGAGGTTCCTGGTGAGCTCATGCAGGAAGACCTGGCAACGGATGACGTCATGCTTCTGGACACCTGGGACCAGGTCTTTGTCTGGGTTGGAAAGGATTCTCAAGAAGAAGAAAAGACAGAAGCCTTGACTTCTGCTAAGCGGTACATCGAGACGGACCCAGCCAATCGGGATCGGCGGACGCCCATCACCGTGGTGAAGCAAGGCTTTGAGCCTCCCTCCTTTGTGGGCTGGTTCCTTGGCTGGGATGATGATTACTGGTCTGTGGACCCCTTGGACAGGGCCATGGCTGAGCTGGCTGCCTGAGGAGGGGCAGGGCCCACCCATGTCACCGGTCAGTGCCTTTTGGAACTGTCCTTCCCTCAAAGAGGCCTTAGAGCGAGCAGAGCAGCTCTGCTATGAGTGTGTGTGTGTGTGTGTGTTGTTTCTTTTTTTTTTTTTTACAGTATCCAAAAATAGCCCTGCAAAAATTCAGAGTCCTTGCAAAATTGTCTAAAATGTCAGTGTTTGGGAAATTAAATCCAATAAAAACATTTTGAAGTGTG

SEQ ID NO: 62 - protein, 1729 aa, Homo sapiens
ATTCTTGTCCATAGTGCATCTGCTTTAAGAATTAACGAAAGCAGTGTCAAGACAGTAAGGATTCAAACCATTTGCCAAAAATGAGTCTAAGTGCATTTACTCTCTTCCTGGCATTGATTGGTGGTACCAGTGGCCAGTACTATGATTATGATTTTCCCCCATCAATTTATGGGCAATCATCACCAAACTGTGCACCAGAATGTAACTGCCCTGAAAGCTACCCAAGTGCCATGTACTGTGATGAGCTGAAATTGAAAAGTGTACCAATGGTGCCTCCTGGAATCAAGTATCTTTACCTTAGGAATAACCAGATTGACCATATTGATGAAAAGGCCTTTGAGAATGTAACTGATCTGCAGTGGCTCATTCTAGATCACAACGTTCTAGAAAACTCCAAGATAAAAGGGAGAGTTTTCTCTAAATTGAAACAACTGAAGAAGCTGCATATAAACCACAACAACCTGACAGAGTCTGTGGGCCCACTTCCCAAATCTCTGGAGGATCTGCAGCTTACTCATAACAAGATCACAAAGCTGGGCTCTTTTGAAGGATTGGTAAACCTGACCTTCATCCATCTCCAGCACAATCGGCTGAAAGAGGATGCTGTTTCAGCTGCTTTTAAAGGTCTTAAATCACTCGAATACCTTGACTTGAGCTTCAATCAGATAGCCAGACTGCCTTCTGGTCTCCCTGTCTCTCTTCTAACTCTCTACTTAGACAACAATAAGATCAGCAACATCCCTGATGAGTATTTCAAGCGTTTTAATGCATTGCAGTATCTGCGTTTATCTCACAACGAACTGGCTGATAGTGGAATACCTGGAAATTCTTTCAATGTGTCATCCCTGGTTGAGCTGGATCTGTCCTATAACAAGCTTAAAAACATACCAACTGTCAATGAAAACCTTGAAAACTATTACCTGGAGGTCAATCAACTTGAGAAGTTTGACATAAAGAGCTTCTGCAAGATCCTGGGGCCATTATCCTACTCCAAGATCAAGCATTTGCGTTTGGATGGCAATCGCATCTCAGAAACCAGTCTTCCACCGGATATGTATGAATGTCTACGTGTTGCTAACGAAGTCACTCTTAATTAATATCTGTATCCTGGAACAATATTTTATGGTTATGTTTTTCTGTGTGTCAGTTTTCATAGTATCCATATTTTATTACTGTTTATTACTTCCATGAATTTTAAAATCTGAGGGAAATGTTTTGTAAACATTTATTTTTTTTAAAGAAAAGATGAAAGGCAGGCCTATTTCATCACAAGAACACACACATATACACGAATAGACATCAAACTCAATGCTTTATTTGTAAATTTAGTGTTTTTTTATTTCTACGGTCAAATGATGTGCAAAACCTTTTACTGGTTGCATGGAAATCAGCCAAGTTTTATAATCCTTAAATCTTAATGTTCCTCAAAGCTTGGATTAAATACATATGGATGTTACTCTCTTGCACCAAATTATCTTGATACTTCAAATTTGTCTGGTTAAAAAATAGGTGGTAGATATTGAGGCCAAGAATATTGCAAAATACATGAACCTTCATGCACTTAAAGAAGTATTTTTAGAATAAGAATTTGCATACTTACCTAGTGAAACTTTTCTAGAATTATTTTTCACTCTAAGTCATGTATGTTCCTCTTTGATTATTTGCATGTTATGTTTAATAAGCTACTAGCAAAATAAAACATAGCAAATGGCAAAAAAAAAAAAAAAAA

SEQ ID NO: 63 - protein, 3703 aa, Homo sapiens
GAATTCTTAGTTGTTTTCTTTAGAAGAACATTTCTAGGGAATAATACAAGAAGATTTAGGAATCATTGAAGTTATAAATCTTTGGAATGAGCAAACTCAGAATGGTGCTACTTGAAGACTCTGGATCTGCTGACTTCAGAAGACATTTTGTCAACCTGAGTCCCTTCACCATTACTGTGGTCTTACTTCTCAGTGCCTGTTTTGTCACCAGTTCTCTTGGAGGAACAGACAAGGAGCTGAGGCTAGTGGATGGTGAAAACAAGTGTAGCGGGAGAGTGGAAGTGAAAGTCCAGGAGGAGTGGGGAACGGTGTGTAATAATGGCTGGAGCATGGAAGCGGTCTCTGTGATTTGTAACCAGCTGGGATGTCCAACTGCTATCAAAGCCCCTGGATGGGCTAATTCCAGTGCAGGTTCTGGACGCATTTGGATGGATCATGTTTCTTGTCGTGGGAATGAGTCAGCTCTTTGGGATTGCAAACATGATGGATGGGGAAAGCATAGTAACTGTACTCACCAACAAGATGCTGGAGTGACCTGCTCAGATGGATCCAATTTGGAAATGAGGCTGACGCGTGGAGGGAATATGTGTTCTGGAAGAATAGAGATCAAATTCCAAGGACGGTGGGGAACAGTGTGTGATGATAACTTCAACATAGATCATGCATCTGTCATTTGTAGACAACTTGAATGTGGAAGTGCTGTCAGTTTCTCTGGTTCATCTAATTTTGGAGAAGGCTCTGGACCAATCTGGTTTGATGATCTTATATGCAACGGAAATGAGTCAGCTCTCTGGAACTGCAAACATCAAGGATGGGGAAAGCATAACTGTGATCATGCTGAGGATGCTGGAGTGATTTGCTCAAAGGGAGCAGATCTGAGCCTGAGACTGGTAGATGGAGTCACTGAATGTTCAGGAAGATTAGAAGTGAGATTCCAAGGAGAATGGGGGACAATATGTGATGACGGCTGGGACAGTTACGATGCTGCTGTGGCATGCAAGCAACTGGGATGTCCAACTGCCGTCACAGCCATTGGTCGAGTTAACGCCAGTAAGGGATTTGGACACATCTGGCTTGACAGCGTTTCTTGCCAGGGACATGAACCTGCTGTCTGGCAATGTAAACACCATGAATGGGGAAAGCATTATTGCAATCACAATGAAGATGCTGGCGTGACATGTTCTGATGGATCAGATCTGGAGCTAAGACTTAGAGGTGGAGGCAGCCGCTGTGCTGGGACAGTTGAGGTGGAGATTCAGAGACTGTTAGGGAAGGTGTGTGACAGAGGCTGGGGACTGAAAGAAGCTGATGTGGTTTGCAGGCAGCTGGGATGTGGATCTGCACTCAAAACATCTTATCAAGTGTACTCCAAAATCCAGGCAACAAACACATGGCTGTTTCTAAGTAGCTGTAACGGAAATGAAACTTCTCTTTGGGACTGCAAGAACTGGCAATGGGGTGGACTTACCTGTGATCACTATGAAGAAGCCAAAATTACCTGCTCAGCCCACAGGGAACCCAGACTGGTTGGAGGGGACATTCCCTGTTCTGGACGTGTTGAAGTGAAGCATGGTGACACGTGGGGCTCCATCTGTGATTCGGACTTCTCTCTGGAAGCTGCCAGCGTTCTATGCAGGGAATTACAGTGTGGCACAGTTGTCTCTATCCTGGGGGGAGCTCACTTTGGAGAGGGAAATGGACAGATCTGGGCTGAAGAATTCCAGTGTGAGGGACATGAGTCCCATCTTTCACTCTGCCCAGTAGCACCCCGCCCAGAAGGAACTTGTAGCCACAGCAGGGATGTTGGAGTAGTCTGCTCAAGATACACAGAAATTCGCTTGGTGAATGGCAAGACCCCGTGTGAGGGCAGAGTGGAGCTCAAAACGCTTGGTGCCTGGGGATCCCTCTGTAACTCTCACTGGGACATAGAAGATGCCCATGTTCTTTGCCAGCAGCTTAAATGTGGAGTTGCCCTTTCTACCCCAGGAGGAGCACGTTTTGGAAAAGGAAATGGTCAGATCTGGAGGCATATGTTTCACTGCACTGGGACTGAGCAGCACATGGGAGATTGTCCTGTAACTGCTCTAGGTGCTTCATTATGTCCTTCAGAGCAAGTGGCCTCTGTAATCTGCTCAGGAAACCAGTCCCAAACACTGTCCTCGTGCAATTCATCGTCTTTGGGCCCAACAAGGCCTACCATTCCAGAAGAAAGTGCTGTGGCCTGCATAGAGAGTGGTCAACTTCGCCTGGTAAATGGAGGAGGTCGCTGTGCTGGGAGAGTAGAGATCTATCATGAGGGCTCCTGGGGCACCATCTGTGATGACAGCTGGGACCTGAGTGATGCCCACGTGGTTTGCAGACAGCTGGGCTGTGGAGAGGCCATTAATGCCACTGGTTCTGCTCATTTTGGGGAAGGAACAGGGCCCATCTGGCTGGATGAGATGAAATGCAATGGAAAAGAATCCCGCATTTGGCAGTGCCATTCACACGGCTGGGGGCAGCAAAATTGCAGGCACAAGGAGGATGCGGGAGTTATCTGCTCAGAATTCATGTCTCTGAGACTGACCAGTGAAGCCAGCAGAGAGGCCTGTGCAGGGCGTCTGGAAGTTTTTTACAATGGAGCTTGGGGCACTGTTGGCAAGAGTAGCATGTCTGAAACCACTGTGGGTGTGGTGTGCAGGCAGCTGGGCTGTGCAGACAAAGGGAAAATCAACCCTGCATCTTTAGACAAGGCCATGTCCATTCCCATGTGGGTGGACAATGTTCAGTGTCCAAAAGGACCTGACACGCTGTGGCAGTGCCCATCATCTCCATGGGAGAAGAGACTGGCCAGCCCCTCGGAGGAGACCTGGATCACATGTGACAACAAGATAAGACTTCAGGAAGGACCCACTTCCTGTTCTGGACGTGTGGAGATCTGGCATGGAGGTTCCTGGGGGACAGTGTGTGATGACTCTTGGGACTTGGACGATGCTCAGGTGGTGTGTCAACAACTTGGCTGTGGTCCAGCTTTGAAAGCATTCAAAGAAGCAGAGTTTGGTCAGGGGACTGGACCGATATGGCTCAATGAAGTGAAGTGCAAAGGGAATGAGTCTTCCTTGTGGGATTGTCCTGCCAGACGCTGGGGCCATAGTGAGTGTGGGCACAAGGAAGACGCTGCAGTGAATTGCACAGATATTTCAGTGCAGAAAACCCCACAAAAAGCCACAACAGGTCGCTCATCCCGTCAGTCATCCTTTATTGCAGTCGGGATCCTTGGGGTTGTTCTGTTGGCCATTTTCGTCGCATTATTCTTCTTGACTAAAAAGCGAAGACAGAGACAGCGGCTTGCAGTTTCCTCAAGAGGAGAGAACTTAGTCCACCAAATTCAATACCGGGAGATGAATTCTTGCCTGAATGCAGATGATCTGGACCTAATGAATTCCTCAGGAGGCCATTCTGAGCCACACTGAAAAGGAAAATGGGAATTTATAACCCAGTGAGTTCAGCCTTTAAGATACCTTGATGAAGACCTGGACTATTGAATGGAGCAGAAATTCACCTCTCTCACTGACTATTACAGTTGCATTTTTATGGAGTTCTTCTTCTCCTAGGATTCCTAAGACTGCTGCTGAATTTATAAAAATTAAGTTTGTGAATGTGACTACTTAGTGGTGTATATGAGACTTTCAAGGGAATTAAATAAATAAATAAGAATGTTAAA

SEQ ID NO: 64 - protein, 5117 aa, Homo sapiens
CCCCAGCCGCATGACGCGCGGAGGAGGCAGCGGGACGAGCGCGGGAGCCGGGACCGGGTAGCCGCGCGCTGGGGGTGGGCGCCGCTCGCTCCGCCCCGCGAAGCCCCTGCGCGCTCAGGGACGCGGCCCCCCCGCGGCAGCCGCGCTAGGCTCCGGCGTGTGGCCGCGGCCGCCGCCGCGCTGCCATGTCTCCGGGCAAGCCGGGGCGGGCGGAGCGGGGACGAGGCGGACCGGCTGGCGGAGGAGGAGGCGAAGGAGACGGCAGGAGGCGGCGACGACGGTGCCCGGGCTCGGGCGCACGGCGGGGCCCGATTCGCGCGTCCGGGGCACGTTCCAGGGCGCGCGGGGCATGAAGCCGGCGGCGCGGGAGGCGCGGCTGCCTCCGCGCTCGCCCGGGCTGCGCTGGGCGCTGCCGCTGCTGCTGCTGCTGCTGCGCCTGGGCCAGATCCTGTGCGCAGGTGGCACCCCTAGTCCAATTCCTGACCCTTCAGTAGCAACTGTTGCCACAGGGGAAAATGGCATAACGCAGATCAGCAGTACAGCAGAATCCTTTCATAAACAGAATGGAACTGGAACACCTCAGGTGGAAACAAACACCAGTGAGGATGGTGAAAGCTCTGGAGCCAACGATAGTTTAAGAACACCTGAACAAGGATCTAATGGGACTGATGGGGCATCTCAAAAAACTCCCAGTAGCACTGGGCCCAGTCCTGTGTTTGACATTAAAGCTGTTTCCATCAGTCCAACCAATGTGATCTTAACTTGGAAAAGTAATGACACAGCTGCTTCTGAGTACAAGTATGTAGTAAAGCATAAGATGGAAAATGAGAAGACAATTACTGTTGTGCATCAACCATGGTGTAACATCACAGGCTTACGTCCAGCGACTTCATATGTATTCTCCATCACTCCAGGAATAGGCAATGAGACTTGGGGAGATCCCAGAGTCATAAAAGTCATCACAGAGCCGATCCCAGTTTCTGATCTCCGTGTTGCCCTCACGGGTGTGAGGAAGGCTGCTCTCTCCTGGAGCAATGGCAATGGCACCGCCTCCTGCCGGGTTCTTCTTGAAAGCATTGGAAGCCATGAGGAGTTGACTCAAGACTCAAGACTTCAGGTCAATATCTCGGACCTGAAGCCAGGGGTTCAATACAACATCAACCCGTATCTTCTACAATCAAATAAGACAAAGGGAGACCCCTTGGGCACAGAAGGTGGCTTGGATGCCAGCAATACAGAGAGAAGCCGGGCAGGGAGCCCCACCGCCCCTGTGCATGATGAGTCCCTCGTGGGACCTGTGGACCCATCCTCCGGCCAGCAGTCCCGAGACACGGAAGTCCTGCTTGTCGGGTTAGAGCCTGGCACCCGATACAATGCCACCGTTTATTCCCAAGCAGCGAATGGCACAGAAGGACAGCCCCAGGCCATAGAGTTCAGGACAAATGCTATTCAGGTTTTTGACGTCACCGCTGTGAACATCAGTGCCACAAGCCTGACCCTGATCTGGAAAGTCAGCGATAACGAGTCGTCATCTAACTATACCTACAAGATACATGTGGCGGGGGAGACAGATTCTTCCAATCTCAACGTCAGTGAGCCTCGCGCTGTCATCCCCGGACTCCGCTCCAGCACCTTCTACAACATCACAGTGTGTCCTGTCCTAGGTGACATCGAGGGCACGCCGGGCTTCCTCCAAGTGCACACCCCCCCTGTTCCAGTTTCTGACTTCCGAGTGACAGTGGTCAGCACGACGGAGATCGGCTTAGCATGGAGCAGCCATGATGCAGAATCATTTCAGATGCATATCACACAGGAGGGAGCTGGCAATTCTCGGGTAGAAATAACCACCAACCAAAGTATTATCATTGGTGGCTTGTTCCCTGGAACCAAGTATTGCTTTGAAATAGTTCCAAAAGGACCAAATGGGACTGAAGGGGCATCTCGGACAGTTTGCAATAGAACTGTTCCCAGTGCAGTGTTTGACATCCACGTGGTCTACGTCACCACCACGGAGATGTGGCTGGACTGGAAGAGCCCTGACGGTGCTTCCGAGTATGTCTACCATTTAGTCATAGAGTCCAAGCATGGCTCTAACCACACAAGCACGTATGACAAAGCGATTACTCTCCAGGGCCTGATTCCGGGCACCTTATATAACATCACCATCTCTCCAGAAGTGGACCACGTCTGGGGGGACCCCAACTCCACTGCACAGTACACACGGCCCAGCAATGTGTCCAACATTGATGTAAGTACCAACACCACAGCAGCAACTTTAAGTTGGCAGAACTTTGATGACGCCTCTCCCACGTACTCCTACTGCCTTCTTATTGAGAAGGCTGGAAATTCCAGCAACGCAACACAAGTAGTCACGGACATTGGAATTACTGACGCTACAGTCACTGAATTAATACCTGGCTCATCATACACAGTGGAGATCTTTGCACAAGTAGGGGATGGGATCAAGTCACTGGAACCTGGCCGGAAGTCATTCTGTACAGATCCTGCGTCCATGGCCTCCTTCGACTGCGAAGTGGTCCCCAAAGAGCCAGCCCTGGTTCTCAAATGGACCTGCCCTCCTGGCGCCAATGCAGGCTTTGAGCTGGAGGTCAGCAGTGGAGCCTGGAACAATGCGACCCACCTGGAGAGCTGCTCCTCTGAGAATGGCACTGAGTATAGAACGGAAGTCACGTATTTGAATTTTTCTACCTCGTACAACATCAGCATCACCACTGTGTCCTGTGGAAAGATGGCAGCCCCCACCCGGAACACCTGCACTACTGGCATCACAGATCCCCCTCCTCCAGATGGATCCCCTAATATTACATCTGTCAGTCACAATTCAGTAAAGGTCAAGTTCAGTGGATTTGAAGCCAGCCACGGACCCATCAAAGCCTATGCTGTCATTCTCACCACCGGGGAAGCTGGTCACCCTTCTGCAGATGTCCTGAAATACACGTATGACGATTTCAAAAAGGGAGCCTCAGATACTTATGTGACATACCTCATAAGAACAGAAGAAAAGGGACGTTCTCAGAGCTTGTCTGAAGTTTTGAAATATGAAATTGACGTTGGGAATGAGTCAACCACACTTGGTTATTACAATGGGAAGCTGGAACCTCTGGGCTCCTACCGGGCTTGTGTGGCTGGCTTCACCAACATTACCTTCCACCCTCAAAACAAGGGGCTCATTGATGGGGCTGAGAGCTATGTGTCCTTCAGTCGCTACTCAGATGCTGTTTCCTTGCCCCAGGATCCAGGTGTCATCTGTGGAGCGGTTTTTGGCTGTATCTTTGGTGCCCTGGTTATTGTGACTGTGGGAGGCTTCATCTTCTGGAGAAAGAAGAGGAAAGATGCAAAGAATAATGAAGTGTCCTTTTCTCAAATTAAACCTAAAAAATCTAAGTTAATCAGAGTGGAGAATTTTGAGGCCTACTTCAAGAAGCAGCAAGCTGACTCCAACTGTGGGTTCGCAGAGGAATACGAAGATCTGAAGCTTGTTGGAATTAGTCAACCTAAATATGCAGCAGAACTGGCTGAGAATAGAGGAAAGAATCGCTATAATAATGTTCTGCCCTATGATATTTCCCGTGTCAAACTTTCGGTCCAGACCCATTCAACGGATGACTACATCAATGCCAACTACATGCCTGGCTACCACTCCAAGAAAGATTTTATTGCCACACAAGGACCTTTACCGAACACTTTGAAAGATTTTTGGCGTATGGTTTGGGAGAAAAATGTATATGCCATCATTATGTTGACTAAATGTGTTGAACAGGGAAGAACCAAATGTGAGGAGTATTGGCCCTCCAAGCAGGCTCAGGACTATGGAGACATAACTGTGGCAATGACATCAGAAATTGTTCTTCCGGAATGGACCATCAGAGATTTCACAGTGAAAAATATCCAGACAAGTGAGAGTCACCCTCTGAGACAGTTCCATTTCACCTCCTGGCCAGACCACGGTGTTCCCGACACCACTGACCTGCTCATCAACTTCCGGTACCTCGTTCGTGACTACATGAAGCAGAGTCCTCCCGAATCGCCGATTCTGGTGCATTGCAGTGCTGGGGTCGGAAGGACGGGCACTTTCATTGCCATTGATCGTCTCATCTACCAGATAGAGAATGAGAACACCGTGGATGTGTATGGGATTGTGTATGACCTTCGAATGCATAGGCCTTTAATGGTGCAGACAGAGGACCAGTATGTTTTCCTCAATCAGTGTGTTTTGGATATTGTCAGATCCCAGAAAGACTCAAAAGTAGATCTTATCTACCAGAACACAACTGCAATGACAATCTATGAAAACCTTGCGCCCGTGACCACATTTGGAAAGACCAATGGTTACATCGCCTAATTCCAAAGGAATAACCTTTCTGGAGTGAACCAGACCGTCGCACCCACAGCGAAGGCACATGCCCCGATGTCGACATGTTTTTATATGTCTAATATCTTAATTCTTTGTTCTGTTTTGTGAGAACTAATTTTGAGGGCATGAAGCTGCATATGATAGATGACAAATTGGGGCTGTCGGGGGCTGTGGATGGGTGGGGAGCAAATCATCTGCATTCCTGATGACCAATGGGATGAGGTCACTTTTTTTTTTTTCCCCCTTGAGGATTGCGGAAAACCAGGAAAAGGGATCTATGATTTTTTTTTCCAAAACAATTTCTTTTTTAAAAAGACTATTTTATATGATTCACATGCTAAAGCCAGGATTGTGTTGGGTTGAATATATTTTAAGTATCAGAGGTCTATTTTTACCTACTGTGTCTTGGAATCTAGCCGATGGAAAATACCTAATTGTGGATGATGATTGCGCAGGGAGGGGTACGTGGCACCTCTTCCGAATGGGTTTTCTATTTGAACATGTGCCTTTTCTGAATTATGCTTCCACAGGCAAAACTCAGTAGAGATCTATATTTTTGTACTGAATCTCATAATTGGAATATACGGAATATTTAAACAGTAGCTTAGCATCAGAGGTTTGCTTCCTCAGTAACATTTCTGTTCTCATTTGATCAGGGGAGGCCTCTTTGCCCCGGCCCCGCTTCCCCTGCCCCCGTGTGATTTGTGCTCCATTTTTTCTTCCCTTTTCCCTCCCAGTTTTC

SEQ ID NO: 65 - protein, 8 aa, Homo sapiens
ALQASALK

SEQ ID NO: 66 - protein, 15 aa, Homo sapiens
LGGPEAGLGEYLFER

SEQ ID NO: 67 - protein, 6 aa, Homo sapiens
VEIFYR

SEQ ID NO: 68 - protein, 9 aa, Homo sapiens
GFLLLASLR

SEQ ID NO: 69 - protein, 9 aa, Homo sapiens
AVGLAGTFR

SEQ ID NO: 70 - protein, 9 aa, Homo sapiens
YVSELHLTR

SEQ ID NO: 71 - protein, 12 aa, Homo sapiens
LQSLFDSPDFSK

SEQ ID NO: 72 - protein, 15 aa, Homo sapiens
TGVITSPDFPNPYPK

SEQ ID NO: 73 - protein, 8 aa, Homo sapiens
TASDFITK

SEQ ID NO: 74 - protein, 11 aa, Homo sapiens
SLEDLQLTHNK

SEQ ID NO: 75 - protein, 8 aa, Homo sapiens
INPASLDK

SEQ ID NO: 76 - protein, 12 aa, Homo sapiens
VITEPIPVSDLR

SEQ ID NO: 77 - protein, 13 aa, Homo sapiens
ALPGTPVASSQPR

SEQ ID NO: 78 - protein, 9 aa, Homo sapiens
ATVNPSAPR

SEQ ID NO: 79 - protein, 8 aa, Homo sapiens
FLNVLSPR

SEQ ID NO: 80 - protein, 12 aa, Homo sapiens
LTLLAPLNSVFK

SEQ ID NO: 81 - protein, 9 aa, Homo sapiens
SGYLLPDTK

SEQ ID NO: 82 - protein, 12 aa, Homo sapiens
TWNDPSVQQDIK

SEQ ID NO: 83 - protein, 9 aa, Homo sapiens
YEVTVVSVR

SEQ ID NO: 84 - protein, 9 aa, Homo sapiens
YYIAASYVK

SEQ ID NO: 85 - protein, 7 aa, Homo sapiens
ELTIGSK

We claim:

1. A method of identifying a status of a pulmonary nodule comprising:
(a) performing an analysis to predict that the pulmonary nodule is not malignant, comprising,
(1) assessing the expression of a plurality of proteins comprising determining the protein level of at least each of ALDOA, FRIL, LG3BP, TSP1, and COIA1, and
(2) calculating a first score based on the protein measurements of step (1);
(b) classifying the risk that the pulmonary nodule of (a) is benign as
(1) statistically significant if the score in step (a)(2) is greater than a first threshold score; or
(2) not statistically significant if the score in step (a)(2) is lesser than the first threshold score;
(c) performing an analysis on the pulmonary nodule of (b)(2), comprising,
(1) assessing the expression of a plurality of proteins comprising determining the protein level of at least each of ALDOA, TSP1, FRIL, KIT, and GGH, and
(2) calculating a second score based on the protein measurements of step (1);
(d) classifying the risk that the pulmonary nodule of (c) is malignant as
(1) statistically significant if the score in step (c)(2) is greater than a second threshold score; or
(2) not statistically significant if the score in step (c)(2) is less than the second threshold score;
thereby identifying the status of the pulmonary nodule as benign or malignant.

2. The method of claim 1, wherein the pulmonary nodule has a diameter of less than or equal to 3 cm.

3. The method of claim 2, wherein the pulmonary nodule has a diameter of about 0.8 cm to 2.0 cm, inclusive of the endpoints.

4. The method of claim 1, wherein the analysis of (a) or (b) is performed on a biological sample selected from the group consisting of tissue, lymph tissue, lymph fluid, blood, plasma, serum, whole blood, urine, saliva, and excreta.

5. The method of claim 4, wherein the pulmonary nodule secretes at least one of the proteins of (a)(1) or (c)(1) into a tissue or fluid from which the biological sample is obtained.

6. The method of claim 4, wherein the biological sample is obtained from a subject.

7. The method of claim 6, wherein the subject is at risk of a lung condition.

8. The method of claim 7, wherein the lung condition is cancer.

9. The method of claim 8, wherein the cancer is non-small cell lung cancer (NSCLC).

10. The method of claim 7, wherein the lung condition is chronic obstructive pulmonary disease, hamartoma, fibroma, neurofibroma, granuloma, sarcoidosis, bacterial infection or fungal infection.

11. The method of claim 1, wherein the assessing steps of (a)(1) and/or (c)(1) are performed by mass spectroscopy (MS).

12. The method of claim 1, wherein the assessing steps of (a)(1) and/or (c)(1) are performed by liquid chromatography-selected reaction monitoring mass spectrometry (LC-SRM-MS).

13. The method of claim 1, wherein the analysis of (a)(2) further comprises determining an interaction between FRIL and COIA1.

14. The method of claim 1, wherein the analysis of (c)(2) further comprises determining an interaction between ALDOA and KIT.

15. The method of claim 1, wherein the analysis of (a)(1) comprises
generating a plurality of transition ion pairs from the plurality of proteins of (a)(1) and
measuring an abundance of at least one transition ion pair, wherein each transition ion pair consists of a precursor ion m/z and a fragment ion m/z, and wherein said plurality of transition ion pairs comprise at least 3 transitions selected from the group consisting of ALQASALK (SEQ ID NO: 65) transition pair 401.25-617.40, LGGPEAGLGEYLFER (SEQ ID NO: 66) transition pair 804.40-913.40, VEIFYR (SEQ ID NO: 67) transition pair 413.73-598.30, GFLLLASLR (SEQ ID NO: 68) transition pair 495.31-559.40, and AVGLAGTFR (SEQ ID NO: 69) transition pair (446.26-721.40).

16. The method of claim 1, wherein the analysis of (c)(1) comprises
generating a plurality of transition ion pairs from the plurality of proteins of (c)(1) and
measuring an abundance of at least one transition ion pair, wherein each transition ion pair consists of a precursor ion m/z and a fragment ion m/z, and wherein said plurality of transition ion pairs comprise at least 3 transitions selected from the group consisting of ALQASALK (SEQ ID NO: 65) transition pair 401.25-617.40, GFLLLASLR (SEQ ID NO: 68) transition pair 495.31-559.40, LGGPEAGLGEYLFER (SEQ ID NO: 66) transition pair 804.40-1083.60, and YVSELHLTR (SEQ ID NO: 70) transition pair.

17. The method of claim 15, wherein the generating a plurality of transition ion pairs from the plurality of proteins of (a)(1) comprises fragmenting each protein into at least one peptide.

18. The method of claim 17, wherein the fragmenting comprises contacting each protein with a trypsin composition.

19. The method of claim 17, wherein the assessing step of (a)(1) are performed by liquid chromatography-selected reaction monitoring mass spectrometry (LC-SRM-MS).

20. The method of claim 1, wherein the protein expression assessment of (a)(1) or (c)(1) is normalized with respect to the protein expression one or more proteins selected from the group consisting of PEDF, MASP1, GELS, LUM, C163A and PTPRJ.

21. The method of claim 20, wherein the transition ion pair assessment of (a)(1) is normalized with respect to the abundance of one or more transition ion pairs selected from the group consisting of LQSLFDSPDFSK (SEQ ID NO: 71) transition pair 692.34-593.30, TGVITSPDFPNPYPK (SEQ ID NO: 72) transition pair 816.92-258.10, TASDFITK (SEQ ID NO: 73) transition pair 441.73-710.40, SLEDLQLTHNK (SEQ ID NO: 74) transition pair 433.23-499.30, INPASLDK (SEQ ID NO: 75) transition pair 429.24-630.30 and VITEPIPVSDLR (SEQ ID NO: 76) transition pair 669.89-896.50.

22. The method of claim 1, wherein the classifying the pulmonary nodule of (b) further comprises determining a sensitivity, a specificity, a negative predictive value or a positive predictive value of the first score.

23. The method of claim 6, wherein the pulmonary nodule is classified in (b) as benign and wherein the subject does not receive treatment.

24. The method of claim 23, wherein the treatment comprises a pulmonary function test (PFT), pulmonary imaging, a biopsy, a surgery, a chemotherapy, a radiotherapy, or any combination thereof.

25. The method of claim 24, where the pulmonary imaging is an x-ray, a chest computed tomography (CT) scan, or a positron emission tomography (PET) scan.

26. The method of claim 6, wherein the pulmonary nodule is benign and wherein the subject receives periodic monitoring for between 1 year and 3 years.

27. The method of claim 26, wherein the periodic monitoring comprises chest computed tomography.

28. The method of claim 6, wherein the pulmonary nodule is malignant and wherein the subject receives treatment according to the standard of care.

29. The method of claim 28, wherein the treatment comprises a pulmonary function test (PFT), pulmonary imaging, a biopsy, a surgery, a chemotherapy, a radiotherapy, or any combination thereof.

30. The method of claim 29, where the pulmonary imaging is an x-ray, a chest computed tomography (CT) scan, or a positron emission tomography (PET) scan.

31. The method of claim 16, wherein the generating a plurality of transition ion pairs from the plurality of proteins of (c)(1) comprises fragmenting each protein into at least one peptide.

32. The method of claim 31, wherein the fragmenting comprises contacting each protein with a trypsin composition.

33. The method of claim 31, wherein the assessing step of (c)(1) are performed by liquid chromatography-selected reaction monitoring mass spectrometry (LC-SRM-MS).

34. The method of claim 17, wherein the at least one peptide is labeled.

35. The method of claim 34, wherein the label is an isotopic label.
